(19) United States
(12) Patent Application Publication
(10) Pub. No.: US 2025/0136990 A1
(43) Pub. Date: May 1, 2025

(54) ANTISENSE OLIGONUCLEOTIDES TARGETING ADENOSINE KINASE

(71) Applicant: Neumirna Therapeutics ApS, København SV (DK)

(72) Inventors: Markus Sakari Kauppinen, Holte (DK); Lykke Pedersen, København NV (DK); Stine Normann Hansen, København S (DK); Henrik Valdemar Klitgaard, Hellerup (DK)

(21) Appl. No.: 18/683,659

(22) PCT Filed: Aug. 19, 2022
(86) PCT No.: PCT/EP2022/073188

§ 371 Date: Feb. 14, 2024

(30) Foreign Application Priority Data
Aug. 19, 2021 (DK) PA202170418

(51) Int. Cl. C12N 15/113; A61P 25/08

(52) U.S. Cl. CPC C12N 15/1137; A61P 25/08; C12N 2310/11; C12N 2310/14; C12N 2310/315; C12N 2310/3231; C12N 2310/3341; C12Y 207/0102

(57) ABSTRACT

The present invention provides antisense oligonucleotide compounds targeting the adenosine kinase pre-mRNA. These antisense oligonucletides are useful in the treatment of a range of neurological diseases, such as epilepsy or neuropathic pain. Compositions and methods of treating neurological diseases using the antisense oligonucleotides of the invention are provided.

### FIELD OF THE INVENTION

[0001] The present invention provides novel antisense oligonucleotide compounds targeting adenosine kinase. The compounds are useful for treatment of neurological diseases such as epilepsy or neuropathic pain.

### BACKGROUND

[0002] Epilepsy is a serious, chronic neurologic disorder characterised by recurrent spontaneous seizures affecting about 50 million people worldwide.

[0003] Present available anti-epileptic drugs control seizures in two-thirds of patients, but probably have no effect on the underlying pathophysiology. The remaining one-third of patients with epilepsy are either drug-resistant or suffer from serious side effects from the presently available drugs. Brain surgery, vagus nerve stimulation, intracranial stimulation and ketogenic diet represent alternatives to avoid seizures in patients without sufficient effects of drug treatment but are only available for a limited number of drug-resistant epilepsy patients and thus the majority continue without efficacious treatment options.

[0004] The development of epilepsy is thought to involve altered expression of ion channels and neurotransmitter receptors, synaptic remodelling, inflammation, gliosis and neuronal death, among others. However, our understanding of the cell and molecular mechanisms remains incomplete. Except for resective surgery, there are no treatments that prevent, modify or cure (“anti-epileptogenic”) epilepsy. Similarly, there are no such treatments for acquired epilepsy following status epilepticus (SE) or a brain injury likely to cause brain damage and epilepsy, for example, stroke, or trauma.

[0005] There is thus a high unmet need for treatments or preventative measures that specifically target the process by which epilepsy, neuropathic pain and other neurological injuries likely to cause brain damage develop and that overcome some of the above-mentioned problems.

### Adenosine and Adenosine Kinase

[0006] Adenosine is a well-characterized endogenous anticonvulsant and seizure terminator in the brain. Adenosine affects seizure generation (ictogenesis), development of epilepsy and its progression (epileptogenesis). Maladaptive changes in adenosine metabolism, in particular increased expression of the astroglial enzyme adenosine kinase (ADK), play a major role in epileptogenesis. (Weltha et al, 2019, The role of adenosine in epilepsy, Brain Res Bull 2019 September, page 1-22.)

[0007] ADK plays a central role in regulating the intracellular and interstitial concentrations of the purine nucleoside adenosine, which exhibits potent cardioprotective and neuroprotective effects. The expression of adenosine kinase undergoes rapid coordinated changes in the brain following epileptic seizures or stroke, resulting in an acute surge of adenosine, which serves to minimize damage to the brain. Two ADK isoforms, which differ at the N-terminal ends are expressed in mammalian cells. The long isoform (ADK-L) contains an extra 20-21 amino acids instead of the first four amino acids of the ADK-short (ADK-S) isoform. The N-terminal extension in the ADK-L functions as a nuclear localization signal. Thus, of the two isoforms, ADK-L is targeted to the nucleus, whereas ADK-S is localised in the cytoplasm. (Cui et al, 2011, Molecular Characterization of Chinese Hamster Cells Mutants Affected in Adenosine Kinase and Showing Novel Genetic and Biochemical Characteristics, BMC Biochemistry 2011.)

[0008] Further, dysregulation of ADK expression and the resulting disruption of adenosine homeostasis is implicated in a wide range of neurologic and neuropsychiatric pathologies. In the brain ADK is primarily expressed in astrocytes and astroglial ADK is a promising target for the prediction and prevention of seizures in epilepsy. Astrogliosis and associated overexpression of ADK have also been identified in a rat model of severe traumatic brain injury (TBI) induced by a lateral fluid percussion injury. Further, ADK expression levels critically determine the brain's vulnerability to the effects of a stroke. Sleep and the intensity of sleep are also enhanced by adenosine and its receptor agonists, whereas antagonists such as caffeine or theophylline induce wakefulness. According to Boison et al., the link between overexpression of ADK and cognitive impairment might be of pathologic relevance for neurologic conditions in which overexpression of ADK has either been confirmed (epilepsy) or suspected (Alzheimer's disease, Parkinson's disease, amyotrophic lateral sclerosis). The adenosine hypothesis of schizophrenia postulates that hypofunction of adenosine signaling may contribute to the pathophysiology of schizophrenia. In diabetes mellitus, adenosine homeostasis is critically altered in several tissues.

[0009] Further, homeostasis of adenosine receptor signaling is of crucial importance in the regulation of inflammation and the release of proinflammatory cytokines. The homeostasis of adenosine receptor signaling is also of critical significance for the chronic inflammatory reactions in IBD. The role of the adenosine/ADK regulatory system in cancer may depend on the type of cancer. ADK activity was found to be reduced in hepatoma cells, suggesting that increased adenosine might provide a selective advantage for hepatic cancers. (Boison et al., 2013, Adenosine Kinase: Exploitation for Therapeutic Gain, Pharmacol Rev 65:906-943, July 2013.)

### Adenosine Receptors

[0010] Activation of inhibitory adenosine A1 receptors is beneficial in epilepsy, chronic pain and cerebral ischemia, and inhibition of facilitatory A2A receptors has profound neuroprotective effects. (Boison et al, 2008, Adenosine as a neuromodulator in neurological diseases, Curr Opin Pharmacol, 2008 February.)

[0011] Adenosine is a neuromodulator that operates via the most abundant inhibitory adenosine A1 receptors (A1Rs) and the less abundant, but widespread, facilitatory A2ARs. It is commonly assumed that A1Rs play a key role in neuroprotection since they decrease glutamate release and hyperpolarize neurons. (Rodrigo A. Cunha, 2005, Neuroprotection by adenosine in the brain: From A1 receptor activation to A2A receptor blockade, Purinergic Signalling (2005) 1:111-134.)

[0012] Restoring A3AR signaling in the spinal cord by inhibiting adenosine kinase or activating A3AR with intrathecal selective A3AR agonists prevent the establishment of chemotherapy-induced neuropathic pain (CINP). (Wahlman et al, 2018, Chemotherapy-induced pain is promoted by enhanced spinal adenosine kinase levels via astrocyte-dependent mechanisms, Pain. 2018 June; 159 (6): 1025-1034 . . . )

### Epilepsy, Neuroprotection and Psychiatric Disorders

[0013] Adenosine has an anticonvulsant and neuroprotective effect. (Patodia et al, 2020, Adenosine kinase and adenosine receptors A1R and A2AR in temporal lobe epilepsy are involved with hippocampal sclerosis and an association exists with risk factors for SUDEP, Epilepsia, page 787-797.)

[0014] Focal adenosine augumentation therapy, using an adenosine kinase inhibitor, has proved to be effective for reducing seizures in both animal models and in human brain tissue resected from refractory epilepsy patients of various etiologies. In addition to reducing seizures, adenosine augumentation therapy can also palliate co-morbidities, like sleep, cognition, or depression. Transgenic mice with reduced ADK were resistant to epileptogenesis induced by acute brain injury. (Wang et al, 2020, Role of Adenosine Kinase Inhibitor in Adenosine Augmentation Therapy for Epilepsy: A Potential Novel Drug for Epilepsy, Current Drug Targets, abstract.)

[0015] According to Boison et al. 2006, adenosine is an inhibitory modulator of brain activity with neuroprotective and anticonvulsant properties. Thus, cell-based delivery of adenosine holds great promise as novel therapies for epilepsy and stroke. (Boison et al, 2013, Adenosine kinase, epilepsy and stroke: mechanisms and therapies, Trends Pharmacol Sci, Abstract.) Adenosine kinase also has a developmental role in mediating behaviors in adulthood related to neuropsychiatric disease. (Osborne et al, 2018, Developmental role of adenosine kinase for the expression of sex-dependent neuropsychiatric behaviour, Neuropharmacology, 2018 October.) schizophrenia, autism, ADHD

[0016] A study by Hai-Ying Shen et al 2012 found that augmentation of adenosine by pharmacologic inhibition of adenosine kinase exerted antipsychotic-like activity in mice. Furthermore, overexpression of ADK in transgenic mice was associated with attentional impairments linked to schizophrenia. (Hai-Ying Shen et al 2012, Adenosine augmentation ameliorates psychotic and cognitive endophenotypes of schizophrenia, J Clin Invest, page 2567-2577.)

### Pain

[0017] According to Otsuguro et al. 2015, an adenosine kinase inhibitor is a potential candidate for controlling pain. (Otsuguro et al,. 2015, An adenosine kinase inhibitor, ABT-702, inhibits spinal nociceptive transmission by adenosine release via equilibrative nucleoside transporters in rat, neuropharmacology volume 97, abstract.) Inhibitors of adenosine kinase enhance extracellular concentrations of the inhibitory neuromodulator adenosine at sites of tissue hyperexcitability and produce antinociceptive effects in animal models of pain and inflammation. Furthermore, adenosine kinase inhibitors produce specific antihyperalgesic effects. (Jarvis et al, 2002, Comparison of the ability of adenosine kinase inhibitors and adenosine receptor agonists to attenuate thermal hyperalgesia and reduce motor performance in rats, Pharmacology Biochemistry and Behavior vol 73, abstract.)

[0018] Adenosine kinase inhibitors have shown antinociceptive activity in a variety of animal models of nociception and novel adenosine kinase inhibitor A-134974 potently reduces tactile allodynia. (Zhu et al, 2001, A-134974: a novel adenosine kinase inhibitor, relieves tactile allodynia via spinal sites of action in peripheral nerve injured rats, Brain Research vol 905, abstract.) Adenosine kinase inhibitors have also been shown to provide effective antinociceptive, anti-inflammatory and anticonvulsant activity in animal models, thus suggesting their potential therapeutic utility for pain, inflammation, epilepsy and possibly other central and peripheral nervous system diseases associated with cellular trauma and inflammation. (Gomtsyan et al, 2004, Non-nucleoside inhibitors of adenosine kinase, Current Pharmaceutical Design, abstract.)

[0019] According to Bauser et al. 2004, adenosine kinase inhibition is an attractive therapeutic approach for several conditions for example, neurodegeneration, seizures, ischemia, inflammation and pain. (Bauser er al, 2004, Discovery and optimization of 2-aryl oxazolo-pyrimidines as adenosine kinase inhibitors using liquid phase parallel synthesis, Bioorganic & Medicinal Chemistry Letters, abstract.)

### Encephalitis

[0020] Rasmussen encephalitis is a rare neurological disorder characterized by unilateral inflammation of cerebral cortex and other structures, most notably the hippocampus, progressive cognitive deterioration, and pharmacoresistant focal epilepsy. Luan et al. suggest that overexpression of adenosine kinase is a common pathologic hallmark of Rasmussen encephalitis, and that upregulation of neuronal A1R in Rasmussen encephalitis is crucial in preventing the spread of seizures. Furthermore, adenosine acts as an endogenous neuromodulator with anticonvulsion and antiinflammation effects, and can restore cognitive function when cognition is impaired secondary to epilepsy. Disruption of adenosine homeostasis has been linked with epilepsy, inflammation and cognitive dysfunction. It has been proved that the alteration of adenosine receptors and the major adenosine-removing enzyme ADK contribute to the disruption of adenosine homeostasis in epilepsy. (Luan et al, 2017, Upregulation of Neuronal Adenosine A1 Receptor in Human Rasmussen Encephalitis, J Neuropathol Exp Neurol vol 76, page 720-731.)

### Angiogenesis

[0021] Targeting adenosine kinase to elevate intracellular adenosine promotes endothelial proliferation and migration in vitro as well as vessel sprouting ex vivo. Additionally, endothelial-specific adenosine kinase knockout mice have increased retinal angiogenesis, accelerated wound healing, and were protected against hindlimb ischemic injury. (Xu et al., 2017, Intracellular adenosine regulates epigenetic programming in endothelial cells to promote angiogenesis, EMBO Molecular Medicine, page 1263-1278.)

### Cancer

[0022] A study by Huang et al 2015 suggested that adenosine kinase is involved in glioma progression, and that increased adenosine kinase levels in peritumoral tissues may be associated with epilepsy in glioma. (Huang et al, 2015, Adenosine deaminase and adenosine kinase expression in human glioma and their correlation with glioma-associated epilepsy, Molecular Medicine Reports 12, page 6509-6516.)

### Diabetes, Inflammation, Cardiovascular Disorders, Kidney Disorders and Lung Disorders

[0023] According to Pye et al 2014, adenosine provides anti-inflammatory effects in cardiovascular disease via activation of adenosine A2A receptors; however, the physiological effect of adenosine could be limited due to its phosphorylation by adenosine kinase. Treatment with the adenosine kinase inhibitor ABY702 reduced blood glucose level in diabetic mice, reduced albuminuria and markers of glomerular injury, nephrinuria and podocalyxin excretion levels, in diabetic mice. Furthermore, indices of oxidative stress were reduced. (Pye et al, 2014, Adenosine Kinase Inhibition Protects The Kidney Against Streptozotocin-Induced Diabetes Through Anti-inflammatory and Anti-oxidant Mechanisms, Pharmacol Res.)

[0024] Activation of A1 adenosine receptor protects against acute kidney injury by improving renal hemodynamic alterations, decreasing tubular necrosis and its inhibition might facilitate removal of toxin or drug metabolite in chronic kidney disease mode. (Pandey et al, 2021, “Adenosine an old player with new possibilities in kidney diseases”: Preclinical evidences and clinical perspectives, Life Sciences vol 265, abstract.)

[0025] In many therapeutic areas modulation of adenosine function has been viewed as a therapeutic option, e.g., neuropathic pain, stroke, asthma, chronic obstructive pulmonary disease (COPD) and sleep promotion. (Knutsen et al, 2007, Therapeutic Areas I: Central Nervous System, Pain, Metabolic Syndrome, Urology, Gastrointestinal and Cardiovascular, Comprehensive Medicinal Chemistry II, 2007, https://www.sciencedirect.com/topics/medicine-and-dentistry/adenosine-kinase-inhibitor, accessed 21-4-2021.)

### SUMMARY OF THE INVENTION

[0026] There is a high unmet medical need for improved treatments of neurological diseases, as many of the diseases cannot be treated in a sufficient manner, or where presently available treatments cause serious side effects. The compounds of the invention are potent inhibitors of ADK, and thereby useful for treatment of neurological diseases such as epilepsy. In some embodiments, the compounds of the invention inhibit both the short and the long isoform of ADK.

### FIGURE LEGENDS

[0027] FIG. 1. Ranking of the ADK-LS antisense oligonucleotides based on ADK-LS knockdown efficacy from the highest to lowest level of knockdown. The horizontal dotted line depicts the level of ADK-LS in-mock treated control cells (no knockdown of ADK-LS). The black line represents 70% knockdown and the grey line 80% knockdown. The vertical dotted line shows the cut-off for ADK-LS antisense oligonucleotides selected for further studies. n,N=1,1-2, mean±SEM.

[0028] FIG. 2. Ranking of the selected ADK-LS antisense oligonucleotides based on ADK-LS knockdown efficacy from the highest to lowest level of knockdown. The horizontal dotted line depicts the level of ADK-LS in mock treated control cells (no knockdown of ADK-LS). and the grey line shows 80% knockdown. n,N=2,3-4, mean±SEM.

[0029] FIG. 3. Dose-response study. The horizontal dotted line depicts the level of ADK-LS in mock treated control cells (no knockdown of ADK-LS) and the grey line shows 80% knockdown. n,N=1-2,2-4, mean±SEM.

[0030] FIG. 4. Dose-response curves and IC50 values, 3-parameter non-linear curve fit, n, N=2,4; all technical replicates are depicted. The horizontal dotted line represents 50% knockdown.

[0031] FIG. 5. Differential gene expression analysis of cells treated with Seq ID 21. The volcano plots show levels of transcripts between Seq ID 21 and mock treated cells, correlating the changes in RNA expression between antisense oligonucleotide-treated and mock treated groups with the significance of the differential expression. The x-axis denoted relative change in expression while the y-axis denotes the significance. Each dot denotes a specific transcript. Black dots represent non-significant changes, while grey dots display significant values. ADK is highlighted with a black ring. n=3

[0032] FIG. 6. Differential gene expression analysis of cells treated with Seq ID 71. The volcano plots show levels of transcripts between Seq ID 71 and mock treated cells, correlating the changes in RNA expression between antisense oligonucleotide-treated and mock treated groups with the significance of the differential expression. The x-axis denoted relative change in expression while the y-axis denotes the significance. Each dot denotes a specific transcript. Black dots represent non-significant changes, while grey dots display significant values. ADK is highlighted with a black ring. n=3

[0033] FIG. 7. Normalized mRNA expression values for ADK (both isoforms), n=3

[0034] FIG. 8. In silico analysis of potential off-targets of the antisense oligonucleotide SEQ ID NO 21 to predict all potential target sites within the spliced transcriptome (cytoplasmic; column 1-4) and the unspliced transcriptome (nuclear, column 5-8). This was carried out for 1) perfect match binding sites in target mRNAs to the aforementioned antisense oligonucleotide (SEQ ID NO 21), and 2) binding sites with 1, 2, 3 or 4 mismatches (INDELs). The resulting list of predicted off-targets was compared with the RNA-sequencing data (top table, 3 nM and lower table, 30 nM), to determine if any of the predicted off-target mRNAs (row 1) were expressed in the data set (row 2) and next, to asses if any of the expressed off-target transcripts were differentially expressed (row 3), and whether such transcripts were upregulated (row 4 and 5) or downregulated (row 6 and 7) in the data set.

[0035] FIG. 9. In silico analysis of potential off-targets of the antisense oligonucleotide SEQ ID NO 71 to predict all potential target sites within the spliced transcriptome (cytoplasmic; column 1-4) and the unspliced transcriptome (nuclear, column 5-8). This was carried out for 1) perfect match binding sites in target mRNAs to the aforementioned antisense oligonucleotide (SEQ ID NO 71), and 2) binding sites with 1, 2, 3 or 4 mismatches (INDELs). The resulting list of predicted off-targets was compared with the RNA-sequencing data (top table, 3 nM and lower table, 30 nM), to determine if any of the predicted off-target mRNAs (row 1) were expressed in the data set (row 2) and next, to asses if any of the expressed off-target transcripts were differentially expressed (row 3), and whether such transcripts were upregulated (row 4 and 5) or downregulated (row 6 and 7) in the data set.

### DETAILED DESCRIPTION OF THE INVENTION

[0036] In describing the embodiments of the invention, specific terminology will be resorted for the sake of clarity. However, the invention is not intended to be limited to the specific terms so selected, and it is understood that each specific term includes all technical equivalents, which operate in a similar manner to accomplish a similar purpose.

[0037] The term “therapeutically effective amount”, or “effective amount” or effective dose “, refers to an amount of a therapeutic agent, which confers a desired therapeutic effect on an individual in need of the agent. The effective amount may vary among individuals depending on the health and physical condition of the individual to be treated, the taxonomic group of the individuals to be treated, the formulation of the composition, the method of administration, assessment of the individual's medical condition, and other relevant factors.

[0038] The term “treatment” refers to any administration of a therapeutic medicament, herein comprising an antisense oligonucleotide that partially or completely cures or reduces one or more symptoms or features of a given disease.

[0039] The term “adenosine kinase transcript” in the context of this invention is a pre-mRNA or a mRNA or other transcript which encodes for at least one of the isoforms of adenosine kinase. i.e. SEQ ID NO 1 which is adenosine kinase pre-mRNA.

[0040] The term “compound” as used herein, refers to a compound comprising an oligonucleotide according to the invention. In some embodiments, a compound may comprise other elements a part from the oligonucleotide of the invention. Such other elements may in non-limiting example be a delivery vehicle which is conjugated or in other way bound to the oligonucleotide.

[0041] “Antisense oligonucleotide” means a single-stranded oligonucleotide having a nucleobase sequence that permits hybridization to a corresponding region or segment of a target nucleic acid.

[0042] In some instances, the antisense oligonucleotide of the present invention is a “mixmer”, and in some instances, the antisense oligonucleotide of the present invention is a “gapmer”.

[0043] A “mixmer” is an antisense oligonucleotide, comprising a mix of nucleoside analogues such as LNA and DNA nucleosides, and wherein the antisense oligonucleotide does not comprise an internal region having a plurality of nucleosides such as a contiguous stretch of not more than 4 or 5 DNA nucleotides. A mixmer is not capable of recruiting an RNAse, such as RNAseH, but rather exerts its effect by binding to the target RNA and thereby blocking its normal function.

[0044] A “gapmer” is an antisense oligonucleotide, comprising a contiguous stretch of of at least 6 or 7 DNA nucleotides of nucleoside flanked by stretches of nucleotides comprising affinity enhancing nucleotide analogues such as LNA nucleosides. A gapmer is capable of recruiting an RNAse, such as RNAseH, wherein the nucleosides comprising the internal region are chemically distinct from the nucleoside or nucleosides comprising the external wings.

[0045] “Nucleoside analogues” are described by e.g. Freier & Altmann; Nucl. Acid. Res., 1997, 25, 4429-4443 and Uhlmann; Curr. Opinion in Drug Development, 2000, 3 (2), 293-213, and examples of suitable and preferred nucleoside analogues are provided by WO2007031091, which are hereby incorporated by reference.

[0046] “5-methylcytosine” means a cytosine modified with a methyl group attached to the 5′ position. A 5-methylcytosine is a modified nucleobase often replacing cytosine in antisense oligonucleotides. It is within the scope of the present invention that in the oligonucleotides of the invention, cytosine is replaced with 5-methylcytosine.

[0047] “2′-O-methoxyethyl” (also 2′-MOE and 2′-O(CH˜)˜—OCH3) refers to an O-methoxy-ethyl modification at the 2′ position of a furanose ring.

[0048] “2′-MOE nucleoside” (also 2′-O-methoxyethyl nucleoside) means a nucleoside comprising a 2′-MOE modified sugar moiety.

[0049] A “locked nucleic acid” or “LNA” is often referred to as inaccessible RNA, and is a modified RNA nucleobase. The ribose moiety of an LNA nucleobase is modified with an extra bridge connecting the 2′ oxygen and 4′ carbon. An LNA oligonucleotide offers substantially increased affinity for its complementary strand, compared to traditional DNA or RNA oligonucleotides. In some aspects bicyclic nucleoside analogues are LNA nucleotides, and these terms may therefore be used interchangeably, and in such embodiments, both are characterized by the presence of a linker group (such as a bridge) between C2′ and C4′ of the ribose sugar ring. When used in the present context, the terms “LNA unit”, “LNA monomer”, “LNA residue”, “locked nucleic acid unit”, “locked nucleic acid monomer” or “locked nucleic acid residue”, refer to a bicyclic nucleoside analogue.

[0050] LNA units are described in inter alia WO 99/14226, WO 00/56746, WO 00/56748, WO 01/25248, WO 02/28875, WO 03/006475, WO2015071388, and WO 03/095467.

[0051] “Beta-D-Oxy LNA”, is a preferred LNA variant.

[0052] “Bicyclic nucleic acid” or “BNA” or “BNA nucleosides” mean nucleic acid monomers having a bridge connecting two carbon atoms between the 4′ and 2′ position of the nucleoside sugar unit, thereby forming a bicyclic sugar. Examples of such bicyclic sugar include, but are not limited to A) pt-L-methyleneoxy (4′-CH2-0-2′) LNA, (B) P-D-Methyleneoxy (4′-CH2-0-2′) LNA, (C) Ethyleneoxy (4′-(CH2) 2-0-2′) LNA, (D) Aminooxy (4′—CH2-0-N(R)-2′) LNA and (E) Oxyamino (4′-CH2-N(R)-0-2′) LNA.

[0053] As used herein, LNA compounds include, but are not limited to, compounds having at least one bridge between the 4′ and the 2′ position of the sugar wherein each of the bridges independently comprises 1 or from 2 to 4 linked groups independently selected from —[C(R˜)(R2)]ₙ—, —C(R˜)═C(R2)—, —C(R˜)═N, —C(═NREM)—, —C(═O)—, —C(═S)—, —O—, —Si(Ri)q—, —S(═O)— and —N(R&)—; wherein: x is 0, 1, or 2; n is 1, 2, 3, or 4; each R& and R2 is, independently, H, a protecting group, hydroxyl, C>>C>> alkyl, substituted C>> (-CHz-) group connecting the 2′ oxygen atom and the 4′ carbon atom, for which the term methyleneoxy (4′-CH&-0-2′) LNA is used.

[0054] Furthermore; in the case of the bicyclic sugar moiety having an ethylene bridging group in this position, the ethyleneoxy (4′-CH&CH&-0-2′) LNA is used. n-L-methyleneoxy (4′-CH&-0-2′), an isomer of methyleneoxy (4′-CH&-0-2′) LNA is also encompassed within the definition of LNA, as used herein.

[0055] In some embodiments, the nucleoside unit is an LNA unit selected from the list of beta-D-oxy-LNA, alpha-L-oxy-LNA, beta-D-amino-LNA, alpha-L-amino-LNA, beta-D-thio-LNA, alpha-L-thio-LNA, 5′-methyl-LNA, beta-D-ENA and alpha-L-ENA.

[0056] “cEt” or “constrained ethyl” means a bicyclic sugar moiety comprising a bridge connecting the 4′-carbon and the 2′-carbon, wherein the bridge has the formula: 4′-CH(CHq)-0-2′.

[0057] “Constrained ethyl nucleoside” (also cEt nucleoside) means a nucleoside comprising a bicyclic sugar moiety comprising a 4′-CH(CH3)-0-2′ bridge. cEt and some of its properties are described in Pallan et al. Chem Commun (Camb). 2012 August 25; 48 (66): 8195-8197.

[0058] “Tricyclo (tc)-DNA” belongs to the class of conformationally constrained DNA analogs that show enhanced binding properties to DNA and RNA. Structure and method of production may be seen in Renneberg et al. Nucleic Acids Res. 2002 Jul. 1; 30 (13): 2751-2757.

[0059] “2′-fluoro”, as referred to herein is a nucleoside comprising a fluoro group at the 2′ position of the sugar ring. 2′-fluorinated nucleotides are described in Peng et al. J Fluor Chem. 2008 September; 129 (9): 743-766.

[0060] “2′-O-methyl”, as referred to herein, is a nucleoside comprising a sugar comprising an -OCH3 group at the 2′ position of the sugar ring.

[0061] “Conformationally Restricted Nucleosides (CRN)” and methods for their synthesis, as referred to herein, are described in WO2013036868, which is hereby incorporated by reference. CRN are sugar-modified nucleosides, in which, similar to LNA, a chemical bridge connects the C2′ and C4′ carbons of the ribose. However, in a CRN, the C2′-C4′ bridge is one carbon longer than in an LNA molecule. The chemical bridge in the ribose of a CRN locks the ribose in a fixed position, which in turn restricts the flexibility of the nucleobase and phosphate group. CRN substitution within an RNA- or DNA-based oligonucleotide has the advantages of increased hybridization affinity and enhanced resistance to nuclease degradation.

[0062] “Unlocked Nucleic Acid” or “UNA”, is as referred to herein unlocked nucleic acid typically where the C2-C3 C—C bond of the ribose has been removed, forming an unlocked “sugar” residue (see Fluiter et al., Mol. Biosyst., 2009, 10, 1039, hereby incorporated by reference, and Snead et al. Molecular Therapy-Nucleic Acids (2013) 2, e103;).

[0063] “RNA therapeutic compound” in the context of this invention is a compound comprising a contiguous sequence of nucleotides that are complementary to a target RNA. The RNA therapeutic compound may be a double-stranded small interfering RNA (siRNA or dsRNA) or a single-stranded antisense oligonucleotide. By binding to the target RNA, the RNA therapeutic compound is capable of blocking or modulating expression of the target RNA. The RNA therapeutic compound may be chemically modified by affinity-enhancing nucleotide analogues, or by internucleotide bonds that increase stability of the compound. The RNA therapeutic compound may also comprise methylated cytosines to inhibit immune stimulation.

[0064] “Motif” in the context of this invention is an unmodified sequence of an antisense oligonucleotide. SEQ ID NO's 83-161 are motif sequences of the modified antisense oligonucleotide compounds of SEQ ID NO's 2-80.

[0065] “Target region” means a portion of a target nucleic acid to which one or more antisense compounds is targeted. Target regions are part of the invention, i.e. SEQ ID NO's 164-205 are target regions having sequences suitable for targeting with therapeutic antisense oligonucleotides according to the invention.

[0066] “Targeted delivery” as used herein means delivery, wherein the antisense oligonucleotide has either been formulated in a way that will facilitate efficient delivery in specific tissues or cells, or wherein the antisense oligonucleotide in other ways has been for example modified to comprise a targeting moiety, or in other way has been modified in order to facilitate uptake in specific target cells.

[0067] The antisense oligonucleotides of the invention are designed to target adenosine kinase (ADK)

[0068] The term “adenosine kinase related neurological disease” as used herein means diseases where disease pathology is linked with upregulation of adenosine kinase activity, or where downregulation of adenosine kinase activity will be beneficial for treatment of the disease.

### Compounds

[0069] The human ADK gene encodes 14 transcripts of which 10 are protein-coding and therefore potential targets for antisense oligonucleotides or siRNAs. A number of ASOs were designed to target the ADK pre-mRNA (SEQ ID NO 1).

[0070] In its broadest sense, the invention provides antisense oligonucleotides or siRNAs complementary to adenosine kinase (ADK) pre-mRNA (SEQ ID NO: 1) comprising a sequence of 10-30 nucleotides in length, wherein the antisense oligonucleotide comprises at least one affinity-enhancing nucleotide analogue and wherein said antisense oligonucleotide comprises at least one phosphorothioate or similar internucleoside linkage. In some embodiments, the antisense oligonucleotides of the invention has an alternative to phosphorothioate internucleoside linkage, such as the backbone can be another type of backbone e.g., a phosphodiester linkage, a phosphotriester linkage, a methylphosphonate linkage, a phosphoramidate linkage, or combinations thereof. In preferred embodiments, an alternative nucleoside backbone is suitable for medical use of the antisense oligonucleotide.

[0071] In some embodiments, the antisense oligonucleotides of the invention are designed to target more than one protein coding ADK form. In preferred embodiment, the antisense oligonucleotides of the invention are designed to target at least two protein coding ADK RNAs. In most preferred embodiment, the antisense oligonucleotides of the invention are designed to target ADK pre-mRNA to downregulate, such as to knock down expression of at least ADK-S and ADK-L.

[0072] For example, the ASOs were constructed to target nucleotides 26138-26158 (SEQ ID NO 164), 28854-28871 (SEQ ID NO 165), 31591-31612 (SEQ ID NO 166), 49618-49648 (SEQ ID NO 167), 73335-73350 (SEQ ID NO 168), 107401-107420 (SEQ ID NO 169), 120681-120698 (SEQ ID NO 170), 131066-131085 (SEQ ID NO 171), 131102-131121 (SEQ ID NO 172), 157279-157300 (SEQ ID NO 173), 163465-163495 (SEQ ID NO 174), 182053-182069 (SEQ ID NO 175), 229825-229843 (SEQ ID NO 176), 230316-230332 (SEQ ID NO 177), 230388-230405 (SEQ ID NO 178), 230484-230505 (SEQ ID NO 179), 243036-243055 (SEQ ID NO 180), 243075-243090 (SEQ ID NO 181), 266808-266823 (SEQ ID NO 182), 267374-267393 (SEQ ID NO 183), 267615-267634 (SEQ ID NO 184), 288247-288266 (SEQ ID NO 185), 302286-302305 (SEQ ID NO 186), 370312-370331 (SEQ ID NO 187), 374190-374206 (SEQ ID NO 188), 404971-404990 (SEQ ID NO 189), 405025-405044 (SEQ ID NO 190), 411523-411541 (SEQ ID NO 191), 431656-431673 (SEQ ID NO 192), 434586-434605 (SEQ ID NO 193), 438147-438189 (SEQ ID NO 194), 438340-438359 (SEQ ID NO 195), 441016-441035 (SEQ ID NO 196), 449173-449194 (SEQ ID NO 197), 451654-451686 (SEQ ID NO 198), 494676-494696 (SEQ ID NO 199), 512508-512527 (SEQ ID NO 200), 512544-512563 (SEQ ID NO 201), 519054-519071 (SEQ ID NO 202), 531984-532003 (SEQ ID NO 203), 532784-532822 (SEQ ID NO 204), and 540164-557611 (SEQ ID NO 205) of SEQ ID NO: 1. The exemplary sequences of the ASOs are described in Table 1. The ASOs were designed to be gapmers recruiting RNAse H for target RNA cleavage. In some embodiments, the antisense oligonucleotide according to the invention is complementary to anyone of SEQ ID NO: 164-205. In some embodiments, the antisense oligonucleotides of the invention are complementary to anyone of SEQ ID NO: 164-205, and are capable of modulating, downregulating or knocking down the expression of both ADK-L and ADK-S. In some embodiments, the antisense oligonucleotide according to the invention consist of or comprise a motif selected from anyone of SEQ ID NO's: 83-161. In some embodiments, the antisense oligonucleotide according to the invention consist of or comprise a motif selected from anyone of SEQ ID NO's: 83-161 and comprise at least one affinity modifying nucleotide analogue and at least one altered internucleoside bond such as a phosphorothioate bond.

[0073] In some embodiments, the antisense oligonucleotide according to the invention is a gapmer, wherein the antisense oligonucleotide contains a contiguous stretch of at least five contiguous DNA nucleotides. The size of an antisense oligonucleotide for medical purposes matters, thus the antisense oligonucleotides according to the present invention are designed to be useful for such use. In some embodiments, the antisense oligonucleotides according to the invention are 10-30 nucleotides in length, and in some embodiments, the antisense oligonucleotide is 14-20 such as 14-19 nucleotides in length.

[0074] The efficacy of an antisense oligonucleotide depends on stability, affinity towards the target RNA and other factors. Presence of affinity enhancing nucleoside analogues such as LNA in an antisense oligonucleotide provide such advantages. In preferred embodiments, the affinity-enhancing nucleotide analogues used in the antisense oligonucleotides of the present invention are selected from the list of LNA, tricyclo-DNA, 2′-Fluoro, 2′-O-methyl, 2′methoxyethyl (2′MOE), 2′ cyclic ethyl (CET), UNA, 2′fluoro and Conformationally Restricted Nucleoside (CRN). In some embodiments, such oligonucletide may comprise a combination of LNA, DNA and one or more of tricyclo-DNA, 2′-Fluoro, 2′-O-methyl, 2′methoxyethyl (2′MOE), 2′ cyclic ethyl (CET), UNA, 2′fluoro and Conformationally Restricted Nucleoside (CRN).

[0075] In some embodiments, the antisense oligonucleotide according to the invention, comprises at least one LNA. In some embodiments, the antisense oligonucleotide comprises from 20-55% LNA. In some embodiments, the antisense oligonucleotide according to the invention is a LNA/DNA oligo but further comprises one or more nucleosides that are anyone of tricyclo-DNA, 2′-Fluoro, 2′-O-methyl, 2′methoxyethyl (2′MOE), 2′ cyclic ethyl (CET), UNA,, 2′fluoro and Conformationally Restricted Nucleoside (CRN).

[0076] In some preferred embodiments, the antisense oligonucleotide according to the invention comprises LNA, wherein the LNA is Beta-D-Oxy LNA.

[0077] Table 1 contains non-limiting examples of the ASO design for selected sequences. The same methods can be applied to any other sequences disclosed herein. The gapmers were constructed to contain locked nucleic acids-LNAs (upper case letters). For example, a gapmer can have Beta-deoxy LNA at the 5′ end and the 3′ end and have a phosphorothioate backbone. But the LNAs can also be substituted with any other nucleotide analog and the backbone can be other type of backbone {e.g., a phosphodiester linkage, a phosphotriester linkage, a methylphosphonate linkage, a phosphoramidate linkage, or combinations thereof). In Table 1, in the Compound designation, upper case designates a modified nucleotide such as an LNA nucleotide (either Beta-D-Oxy, Alpha-L-Oxy, Beta-D-Amino or Beta-D-Thio LNA or other modified nucleotide such as cEt, cMOE, UNA or ENA) and lower case designates a DNA nucleotide. Thus a sequence represented by TCTttcctacttaaGG (SEQ ID NO: 30) represents a 3-11-2 16mer modified nucleotide-DNA-modified nucleotide gapmer with a 5′-T and 3′-G, such as a 3-11-2 LNA-DNA-LNA gapmer. Some ASOs can be an alternating flank gapmer as described elsewhere herein. In some embodiments, selected examples of alternating flank gapmers having a 9 nucleotide gap are SEQ ID NOs 5, 21 and 51.

[0078] In some embodiments, the antisense oligonucleotide according to the invention is designed so that all the internucleoside bonds are phosphorothioate bonds. In some embodiments, the present invention provides a series of potent antisense oligonucleotides, wherein the antisense oligonucleotide is anyone of SEQ ID NO's 2-80. In some embodiments the invention provides an antisense oligonucleotide selected from the list of SEQ ID NO 4, SEQ ID NO 12, SEQ ID NO 20, SEQ ID NO 21, SEQ ID NO 37, SEQ ID NO 50, SEQ ID NO 51, SEQ ID NO 53, SEQ ID NO 59, SEQ ID NO 60, SEQ ID NO 63, SEQ ID NO 66, SEQ ID NO 67, SEQ ID NO 68, SEQ ID NO 69, SEQ ID NO 70, SEQ ID NO 71, SEQ ID NO 72, SEQ ID NO 73, SEQ ID NO 74, SEQ ID NO 75, SEQ ID NO 76, SEQ ID NO 77, SEQ ID NO 78, SEQ ID NO 79, and SEQ ID NO 80 as such, as well as conjugates comprising such antisense oligonucleotides, compositions comprising such antisense oligonucleotides, and their contemplated use for treatment as described in this application. Further, methods of treatment using the antisense oligonucleotides of this invention are also encompassed by the invention.

[0079] In Table 1 the listed ASOs are always depicted in the 5′ to 3′ direction. Therefore, the 5′ end of an ASO hybridizes to the pre-mRNA “end” number in the table and the 3′ end of the ASO hybridizes to the pre-mRNA “start” number in the tables. In some embodiments, the antisense oligonucleotide of the invention comprise or consist of the motif of anyone of SEQ ID NO: 83-161. In some embodiments, the antisense oligonucleotide of the invention comprise or consist of the compound of anyone of SEQ ID NO: 2-80.

TABLE 1
List of contiguous nucleobase sequence motifs (SEQ ID
NO's 83-161) complementary to SEQ ID NO: 1), as well
as specific ASO compounds (SEQ ID NO's 2-80) designed
based on the motif sequences.

| start | end | | SEQ | | SEQ |
|---|---|---|---|---|---|
| in SEQ | in SEQ | | ID | | ID |
| ID 1 | ID 1 | Motif | NO | ASO compound | NO |
| 26138 | 26157 | ACACACAATTTCACAACTTG | 83 | ACacacaatttcaCaaCtTG | 2 |
| 26139 | 26158 | GACACACAATTTCACAACTT | 84 | GAcAcacaatttcaCaAcTT | 3 |
| 28854 | 28871 | CTATATTTAGCAACAATT | 85 | CTATatttagcaacAATT | 4 |
| 31591 | 31610 | TTTTATCTTTGACAGTTCTG | 86 | TTttatctttgAcaGttcTG | 5 |
| 31594 | 31612 | AGTTTTATCTTTGACAGTT | 87 | AGTtttatctttgAcagTT | 6 |
| 31595 | 31612 | AGTTTTATCTTTGACAGT | 88 | AGTtttatctttGacaGT | 7 |
| 49618 | 49637 | TTATCAAGGAAATCTTTGTC | 89 | TTAtCaaggaaatcTTtgTC | 8 |
| 49625 | 49644 | TACTTACTTATCAAGGAAAT | 90 | TACtTacttatcaaGgaaAT | 9 |
| 49629 | 49648 | TTAATACTTACTTATCAAGG | 91 | TTaAtaCttacttatcaAGG | 10 |
| 73335 | 73350 | GTTTCAGAGAATACCT | 92 | GTtTcagagaataCCT | 11 |
| 107401 | 107420 | TTTGATTACTTCTAAATCTG | 93 | TTTGattacttctaaAtcTG | 12 |
| 120681 | 120698 | CATATCAATGGAAAGTTC | 94 | CATaTCaatggaaagTTC | 13 |
| 131066 | 131085 | ATGTGAAATCTTAAACATCC | 95 | ATGtgaaaTcttaaacatCC | 14 |
| 131102 | 131121 | TTAATTTACAACTTCATCTG | 96 | TTAAtttacaactTcAtcTG | 15 |
| 157279 | 157298 | AAAGCTTTGAAATCTTTTAC | 97 | AAAgCttTGaaatcttttAC | 16 |
| 157281 | 157300 | TCAAAGCTTTGAAATCTTTT | 98 | TCaaagCTTtgaaatcttTT | 17 |
| 163465 | 163484 | TTTCACAAGTTCATCAAACC | 99 | TTtcAcaagttcatcaAaCC | 18 |
| 163474 | 163493 | TTTGAATTTTTTCACAAGTT | 100 | TTtgAAtTTtttcacaagTT | 19 |
| 163476 | 163495 | ACTTTGAATTTTTTCACAAG | 101 | ACtTtGaAttttttcacAAG | 20 |
| 182053 | 182069 | TTTTAATGTGACATGCT | 102 | TTtTaatgtgacaTGCT | 21 |
| 229825 | 229843 | TGAAATTCATGCATTTGTT | 103 | TGaaattcatgcATtTgTT | 22 |
| 230316 | 230332 | TGTTTTAAGTCTACCTG | 104 | TGttTTaagtctaccTG | 23 |
| 230388 | 230405 | CACATATGGCTGATCATT | 105 | CACatatggctgAtcaTT | 24 |
| 230484 | 230503 | TGAAACATCTGGTCAATATC | 106 | TGaAAcatctggtcaAtaTC | 25 |
| 230487 | 230505 | ATTGAAACATCTGGTCAAT | 107 | ATtgaaacatcTggtCaAT | 26 |
| 243036 | 243052 | TAATGAGCATCCACATG | 108 | TAatgagcatccACaTG | 27 |
| 243037 | 243055 | TAGTAATGAGCATCCACAT | 109 | TAgtaatgagca TccacAT | 28 |
| 243075 | 243090 | CAGCACAAGTTCCTGT | 110 | CAgcAcaagttcctGT | 29 |
| 266808 | 266823 | TCTTTCCTACTTAAGG | 111 | TCTttcctacttaaGG | 30 |
| 267374 | 267393 | TATAACACCAACCACTTTTT | 112 | TAtaacaccaaccActttTT | 31 |
| 267615 | 267634 | AGAAAATTGTTCTACAATAG | 113 | AGaAaattgttctAcaATAG | 32 |
| 288247 | 288266 | AAAATCAGTTCTACTTTCAT | 114 | AAaatcagttcTacTTtCAT | 33 |
| 302286 | 302305 | TCAACAAATTCACATCAATG | 115 | TCAAcAAaTtcacatcaaTG | 34 |
| 370312 | 370331 | AAATAGTAACCTGGTCAAAT | 116 | AAAtagtaacctGGtCaAAT | 35 |
| 374190 | 374206 | ATATCAACATAAGGCAT | 117 | ATatcaacataAgGCAT | 36 |
| 404971 | 404990 | AACATGTATAAGTTGTCAAT | 118 | AACatgtataagTtGTCaAT | 37 |
| 405025 | 405044 | ATTGCTATGGTAACTACATT | 119 | ATtgctATggtaactacaTT | 38 |
| 411523 | 411541 | ACTATATTAAAAAGGATCC | 120 | ACTatattaaaaAgGaTCC | 39 |
| 431656 | 431673 | TATAACTTTTTGGAGATT | 121 | TAtAActttttggaGATT | 40 |
| 434586 | 434605 | TCACAAATCTAATGAAGCAG | 122 | TCaCaaatCtaatgaagcAG | 41 |
| 438147 | 438166 | TAGAAAAAACCTTTAGGATO | 123 | TAgAAAaAacctttaggATC | 42 |
| 438153 | 438172 | ATCAGCTAGAAAAAACCTTT | 124 | ATcAGctagaaaaaACctTT | 43 |
| 438155 | 438174 | TTATCAGCTAGAAAAAACCT | 125 | TTatCagctagaaaAaacCT | 44 |
| 438170 | 438189 | TCCAAAAGAACTTCATTATC | 126 | TCcaAAaGaacttcattaTC | 45 |
| 438340 | 438359 | CAAGAGGCTTTTCAAAATTC | 127 | CAaGaggcttttcaAaaTTC | 46 |
| 441016 | 441035 | GAATTGTCATTTTAAATTCT | 128 | GAATtgtcattttaaATtCT | 47 |
| 449173 | 449192 | TTTAATGTCTTTAGTCTATT | 129 | TTtAAtgtctttagtCtaTT | 48 |
| 449174 | 449193 | CTTTAATGTCTTTAGTCTAT | 130 | CTttaatgtctttAgtctAT | 49 |
| 449178 | 449194 | TCTTTAATGTCTTTAGT | 131 | TCtttaatgtcTtTAGT | 50 |
| 451654 | 451673 | TATTATTGACATTTATTTGG | 132 | TATtAttgacatttAtTtGG | 51 |
| 451667 | 451686 | TTTAATTCTCTTTTATTATT | 133 | TTTaattctctttTATtaTT | 52 |
| 494676 | 494694 | AACTGACTCAATTGATATG | 134 | AActgactcaaTTgAtATG | 53 |
| 494677 | 494696 | TGAACTGACTCAATTGATAT | 135 | TGaActgactcaatTgaTAT | 54 |
| 512508 | 512527 | AAAAAGCAGAAAGTCTTTTT | 136 | AAAAagcagaaagTCttTTT | 55 |
| 512544 | 512563 | AGCTCTGAGTTAATTTAATT | 137 | AGctcTgagttaattTaaTT | 56 |
| 519054 | 519071 | TACCTCCAACAAATGCAT | 138 | TAccTcCaacaaatgcAT | 57 |
| 519056 | 519071 | TACCTCCAACAAATGC | 139 | TAccTccaacaaatGC | 58 |
| 531984 | 532003 | GCTCAAAGAACTAACATCTG | 140 | GCtcaaagaactAacAtcTG | 59 |
| 532784 | 532801 | AGTAAACACGTTTACAGC | 141 | AGtaaaCacgtttacaGC | 60 |
| 532795 | 532814 | AATACTCTGTTTGAGTAAAC | 142 | AATaCtctgtttgaGtAaAC | 61 |
| 532802 | 532821 | TAAAATCAATACTCTGTTTG | 143 | TAAAatCaatactctgTTTG | 62 |
| 532803 | 532822 | GTAAAATCAATACTCTGTTT | 144 | GTAAaAtCaatactctgTTT | 63 |
| 540164 | 540182 | AAGTTATCATGTAATTACC | 145 | AAgtTATcatgtaattaCC | 64 |
| 557593 | 557611 | TCTATTATATTAAATTGCA | 146 | TCTattatattaAattGCA | 65 |
| 404971 | 404990 | AACATGTATAAGTIGTCAAT | 147 | AACatgtataagttGTCaAT | 66 |
| 404971 | 404990 | AACATGTATAAGTIGTCAAT | 148 | AAcatgtataagTtGTCaAT | 67 |
| 494676 | 494694 | AACTGACTCAATTGATATG | 149 | AActgactcaaTTGAtATG | 68 |
| 163476 | 163495 | ACTTTGAATTTTTTCACAAG | 150 | ACtTTGaAttttttcacAAG | 69 |
| 163476 | 163495 | ACTTTGAATTTTTTCACAAG | 151 | ACtTtGaAttttttcaCAAG | 70 |
| 532784 | 532801 | AGTAAACACGTTTACAGC | 152 | AGTaaaCacgtttacaGC | 71 |
| 532784 | 532801 | AGTAAACACGTTTACAGC | 153 | AGtaaaCAcgtttacaGC | 72 |
| 28854 | 28871 | CTATATTTAGCAACAATT | 154 | CTATaTttagcaacAATT | 73 |
| 28854 | 28871 | CTATATTTAGCAACAATT | 155 | CTATatttagcaAcAATT | 74 |
| 438147 | 438166 | TAGAAAAAACCTTTAGGATC | 156 | TAgAAAaAaCctttaggATC | 75 |
| 557593 | 557611 | TCTATTATATTAAATTGCA | 157 | TCTattatattaAatTGCA | 76 |
| 449178 | 449194 | TCTTTAATGTCTTTAGT | 158 | TCTttaatgtcTtTAGT | 77 |
| 449178 | 449194 | TCTTTAATGTCTTTAGT | 159 | TCtttaatgTcTtTAGT | 78 |
| 107401 | 107420 | TTTGATTACTTCTAAATCTG | 160 | TTTGattacttctaaAtCTG | 79 |
| 182053 | 182069 | TTTTAATGTGACATGCT | 161 | TTTTaatgtgacaTGCT | 80 |
| Scrambled | | AAACCTAGCACCTTTTAG | 162 | AAaCcTagcaccttTtAG | 81 |
| Scrambled | | TTGCTACACTCAACAGAT | 163 | TTgctacactcaAcAgAT | 82 |

[0080] In “ASO compound” capital letters are nucleotide analogues, such as LNA, such as betadeoxy-LNA. Small letters denote DNA. C may be 5′methyl-cytosine. In one embodiment, all internucleoside bonds in SEQ ID NO's 2-80 are phosphorothioate. In one embodiment, all internucleoside bonds in SEQ ID NO's 2-80 are phosphorothioate, capital letters are LNA, such as betadeoxyLNA, small letters denote DNA and C's are 5′methyl-cytosine.

[0081] In some embodiments, the compound of the invention is a siRNA. In some embodiments, the siRNA comprise a mofidied nucleotide. In some embodiments, the modified nucleotide is selected from the group a deoxy-nucleotide, a 3′-terminal deoxythimidine (dT) nucleotide, a 2′-O-methyl modified nucleotide, a 2′-fluoro modified nucleotide, a 2′-deoxy-modified nucleotide, a locked nucleotide, an unlocked nucleotide, a conformationally restricted nucleotide, a constrained ethyl nucleotide, an abasic nucleotide, a 2′-amino-modified nucleotide, a 2′-O-allyl-modified nucleotide, 2′-C-alkyl-modified nucleotide, 2′-hydroxy-modified nucleotide, a 2′-methoxyethyl modified nucleotide, a 2′-O-alkyl-modified nucleotide, a morpholino nucleotide, a phosphoramidate, a non-natural base comprising nucleotide, a tetrahydropyran modified nucleotide, a 1,5-anhydrohexitol modified nucleotide, a cyclohexenyl modified nucleotide, a nucleotide comprising a 5′-phosphorothioate group, a nucleotide comprising a 5′-methylphosphonate group, a nucleotide comprising a 5′-phosphate or 5′ phosphate mimic, a nucleotide comprising vinyl phosphonate, a nucleotide comprising adenosineglycol nucleic acid (GNA), a nucleotide comprising thymidine-glycol nucleic acid (GNA)S-Isomer, a nucleotide comprising 2-hydroxymethyl-tetrahydrofurane-5-phosphate, a nucleotide comprising 2′-deoxythymidine-3′phosphate, a nucleotide comprising 2′-deoxyguanosine-3′-phosphate, and a terminal nucleotide linked to a cholesteryl derivative and a dodecanoic acid bisdecylamide group; and combinations thereof.

[0082] In some embodiments, the siRNA of the invention comprise a modified nucleotide selected from a 2′-deoxy-2′-fluoro modified nucleotide, a 2′-deoxy-modified nucleotide, 3′-terminal deoxythimidine nucleotides (dT), a locked nucleotide, an abasic nucleotide, a 2′-amino-modified nucleotide, a 2′-alkyl-modified nucleotide, a morpholino nucleotide, a phosphoramidate, and a non-natural base comprising nucleotide.

### Compositions and Uses

[0083] The compounds of the invention are for use in the compositions, such as in the pharmaceutical compositions of the invention, and for the use as medicaments, and for treatment, alleviation, amelioration, pre-emptive treatment, prophylaxis, disease modifying or curative treatment of the diseases disclosed herein, such as neurological disorders, including epilepsy. In some embodiments, the anti-adenosine kinase compounds of the invention are preventive, disease modifying, curative, reducing symptoms of the disease, including improved seizure control and reduction of anxiety and depression and cognitive impairment.

[0084] The compounds of the invention are in some embodiments comprised in compositions, such as pharmaceutical compositions for treatment of diseases, which are diseases where modulation of adenosine kinase activity is beneficial for preventive, curative or disease modifying treatment, prophylaxis, alleviation or amelioration of the disease or disease parameters. In some embodiments, the treatment, prophylaxis, alleviation or amelioration is curative. In some embodiments, the treatment, prophylaxis, alleviation or amelioration is disease modifying. In some embodiments, the treatment, prophylaxis, alleviation or amelioration is preventive.

[0085] Diseases that may be treated, alleviated, ameliorated, pre-emptively treated or prophylactically treated by the compounds and compositions include in non-limiting example diseases of the central nervous system (CNS) or peripheral nervous system (PNS), including neurological disorders, neurodegenerative disorders, neurodevelopmental disorders, or psychiatric diseases. In some embodiments, the antisense oligonucleotide or composition according to the invention is for use as a neuroprotective agent.

[0086] In some embodiments, the antisense oligonucleotide or composition according to the invention is for use in the treatment, alleviation, pre-emptive treatment or prophylaxis of a disease of the CNS or PNS, a neurological disorder, a neurodegenerative disorder, a neurodevelopmental disorder, a central and peripheral nervous system diseases associated with cellular trauma and inflammation, neuronal damage, hippocampal damage, traumatic brain injury, a memory disorder, hippocampal sclerosis, Parkinsons Disease, multiple sclerosis, acute spinal cord injury, amyotrophic lateral sclerosis, ataxia, bell's palsy, Charcot-Marie-Tooth, a headache, Horton's headache, migraine, pick's disease, progressive supranuclear palsy, multi-system degeneration, a motor neuron disease, Huntington's disease, prion disease, Creutzfeldt-Jakob disease, corticobasal degeneration, primary progressive aphasia or symptoms or effects thereof.

[0087] In some embodiments, the antisense oligonucleotide or composition according to the invention is for use in the treatment of epilepsy.

[0088] In some embodiments, the antisense oligonucleotide or composition according to the invention is for use in the treatment of seizures.

[0089] In some embodiments, the antisense oligonucleotide or composition according to the invention is for use in the treatment, alleviation, pre-emptive treatment or prophylaxis of epilepsy and/or seizures, preferably a treatment resistant epilepsy, acquired, genetic and/or idiopathic epilepsy, therapy resistant epileptic syndromes, drug resistant epilepsy, pharmacy resistant focal epilepsy, spontaneous seizures, therapy resistant seizures, focal epilepsy, generalised epilepsy or status epilepticus.

[0090] In some embodiments, the antisense oligonucleotide or composition according to the invention is for use in the treatment, alleviation, pre-emptive treatment or prophylaxis of epilepsy, drug resistant epilepsy, pharmacoresistant focal epilepsy, seizures, spontaneous seizures, therapy resistant seizures, focal epilepsy, preferably wherein said focal epilepsy is focused in the frontal lobe, the parietal lobe, the occipital lobe or the temporal lobe, generalised epilepsy, preferably wherein said generalised epilepsy is selected among absences, myoclonic seizures, tonic-clonic seizures, tonic seizures, atonic seizures, clonic seizures and spasms, status epilepticus, epileptogenesis induced by acute brain injury, autosomal dominant nocturnal frontal lobe epilepsy, continuous spike-and-waves during slow sleep, dravet syndrome, epilepsy developed after apoplexy, epileptic encephalopathy, gelastic epilepsy, absences, benign neonatal seizures, Jeavons syndrome, Juvenile myoclonic epilepsy, Landau-Kleffner Syndrom, Lennox-Gastaut syndrome, Mesial temporal lobe epilepsy, myoclonic astatic epilepsy, Ohtahara Syndrom, Panayiotopoulos syndrome, PCDH19 syndrom, benign childhood epilepsy with centrotemporal spikes, Sturge-Weber syndrome, symptomatic focal epilepsy, transient epileptic amnesia and West syndrome, and/or glioma-associated epilepsy.

[0091] In some embodiments, the antisense oligonucleotide or composition according to the invention is for use in the treatment, alleviation, pre-emptive treatment or prophylaxis of pain, preferably wherein said pain is a chronic pain, a neuropathic pain, a chemotherapy-induced neuropathic pain, a migraine, a headaches, hyperalgesia, allodynia and/or fibromyalgia.

[0092] In some embodiments, the antisense oligonucleotide or composition according to the invention is for use in the treatment of pain.

[0093] In some embodiments, the antisense oligonucleotide or composition according to the invention is for use in the treatment, alleviation, pre-emptive treatment or prophylaxis of pain, chronic plain, neuropathic pain, chemotherapy-induced neuropathic pain, migraine, including migraine with aura and migraine without aura, a primary headache, a tension headache, a cluster headache, Hortons headache, a chronic daily headache, a sinus headache, a posttraumatic headache, an exercise headache, hemicrannia continua, hypnic headache, hyperalgesia, thermal hyperalgesia, allodynia, tactile allodynia and/or fibromyalgia.

[0094] In some embodiments, the antisense oligonucleotide or composition according to the invention is for use in the treatment, alleviation, pre-emptive treatment or prophylaxis of a psychiatric disorder, a cognitive disorder, a sleep disorder, a cardiovascular disorder, a respiratory disorder, a cancer, a renal disorder, an inflammation or a metabolic disorder.

[0095] In some embodiments, the antisense oligonucleotide or composition according to the invention is for use in the treatment, alleviation, pre-emptive treatment or prophylaxis of a psychiatric disorder, a neuropsychiatric disorder, anxiety, depression, bipolar disorder, attention deficit hyperactive disorder, attention deficit disorder, autism, Asperger's, Tourette, schizophrenia, paranoid schizophrenia, hebephrenic schizophrenia, catatonic schizophrenia, undifferentiated schizophrenia, residual schizophrenia, simple schizophrenia or unspecified schizophrenia.

[0096] In some embodiments, the antisense oligonucleotide or composition according to the invention is for use in the treatment, alleviation, pre-emptive treatment or prophylaxis of a cognitive disorder, cognitive impairment, dementia, Alzheimer disease, vascular dementia, frontotemporal dementia or Lewy bodies dementia.

[0097] In some embodiments, the antisense oligonucleotide or composition according to the invention is for use in the treatment, alleviation, pre-emptive treatment or prophylaxis of a sleep disorder.

[0098] In some embodiments, the antisense oligonucleotide or composition according to the invention is for use as a sleep modulating agent.

[0099] In some embodiments, the antisense oligonucleotide or composition according to the invention is for use in sleep promotion.

[0100] In some embodiments, the antisense oligonucleotide or composition according to the invention is for use in the treatment, alleviation, pre-emptive treatment or prophylaxis of a cardiovascular disorders, a peripheral artery disease, postoperative atrial fibrillation, heart failure, chronic heart failure, intracerebral haemorrhage-induced brain injury, stroke, cerebral ischemia or ischaemia.

[0101] In some embodiments, the antisense oligonucleotide or composition according to the invention is for use in the treatment, alleviation, pre-emptive treatment or prophylaxis of a respiratory disorder, asthma or chronic obstructive pulmonary disease.

[0102] In some embodiments, the antisense oligonucleotide or composition according to the invention is for use in the treatment, alleviation, pre-emptive treatment or prophylaxis of a cancer, a cancer in the nervous system, glioma, glioblastoma, hepatic cancer or a cancer metastasis.

[0103] In some embodiments, the antisense oligonucleotide or composition according to the invention is for use in the treatment, alleviation, pre-emptive treatment or prophylaxis of a renal disorder, renal injury, renal inflammation, albuminuria or glomerular injury.

[0104] In some embodiments, the antisense oligonucleotide or composition according to the invention is for use in the treatment, alleviation, pre-emptive treatment or prophylaxis of inflammation.

[0105] In some embodiments, the antisense oligonucleotide or composition according to the invention is for use in the treatment, alleviation, pre-emptive treatment or prophylaxis of an inflammatory disorder, oxidative stress, inflammation, apoptosis, arthritis, osteoarthritis, rheumatoid arthritis, and the pain associated with these conditions, encephalitis, meningitis, human Rasmussen encephalitis, inflammation of cerebral cortex and/or hippocampus, progressive cognitive deterioration, colitis, ulcerative colitis or inflammatory bowel disease.

[0106] In some embodiments, the antisense oligonucleotide or composition according to the invention is for use in the treatment, alleviation, pre-emptive treatment or prophylaxis of a metabolic disorder, preferably diabetes, more preferably type 1 or type 2 diabetes.

[0107] In some embodiments, the antisense oligonucleotide or composition according to the invention is for use in the treatment, alleviation, pre-emptive treatment or prophylaxis of Prader-Willis

[0108] Syndrome, Anglemans Syndrome, neurofibromatosis, an angiogenesis related disease, promotion of angiogenesis, a disorder of the retina, preferably diabetic retinopathy or hearing loss.

[0109] In some embodiments, the antisense oligonucleotide or composition according to the invention is administered by systemic administration, intrathecal administration, intraventricular administration into the CNS or intravenous administration.

[0110] In some embodiments, the antisense oligonucleotide or composition according to the invention is for use in combination with one or more other active pharmaceutical ingredients for the treatment of anyone of the diseases of the invention.

[0111] According to an embodiment, the invention concerns the use of the antisense oligonucleotides according to the invention, wherein the other active pharmaceutical ingredient is an ingredient made for treatment of the diseases of the invention.

[0112] According to an embodiment, the invention concerns the use of the antisense oligonucleotides according to the invention, wherein the other pharmaceutical ingredient is an antisense oligonucleotide.

[0113] According to an embodiment, the invention concerns the use of the antisense oligonucleotides according to the invention, wherein the other pharmaceutical ingredient is an antisense oligonucleotide targeting miR-27b or miR-134 or both.

[0114] According to an embodiment, the invention concerns a pharmaceutical composition comprising an effective dosage of the antisense oligonucleotide according to the invention and a pharmaceutically acceptable carrier. In some such embodiments, the antisense oligonucleotide according to the invention is conjugated, i.e. to a delivery vehicle or to another therapeutic molecule or to a molecule that in some way enhances the efficacy of the antisense oligonucleotide according to the invention.

[0115] According to an embodiment, the invention concerns a pharmaceutical composition comprising an effective dosage of the antisense oligonucleotide according to the invention, wherein said antisense oligonucleotide is the sole active pharmaceutical ingredient.

[0116] In some embodiments, the anti-adenosine kinase compounds may advantageously be used together with other therapies for a certain disease to be treated by the anti-adenosine kinase composition. In some embodiments the anti-adenosine kinase compounds of the invention are for use in combination with other therapy for the neurological diseases mentioned in this application. In some embodiments the anti-adenosine kinase compounds of the invention are for use in treatment, alleviation, amelioration, pre-emptive treatment, prophylaxis, disease modifying or curative treatment of neurological diseases in particular epilepsy, pain or stroke in combination with other therapy for treatment, alleviation, amelioration, pre-emptive treatment, prophylaxis, disease modifying or curative treatment of neurological diseases in particular epilepsy, pain or stroke or comorbidities to those.

[0117] Thereby, the anti-adenosine kinase antisense oligonucleotide of the invention is for use in combination with one or more other therapies. In some embodiments, said other therapy is an anti miR-27b antisense oligonucleotide. In some embodiments, said other therapy is an anti miR-134 antisense oligonucleotide. In some embodiments, said other therapy induces the Nrf-2/ARE pathway in a mammal, such as in a human. In some embodiments, the anti-adenosine kinase antisense oligonucleotide compositions are to be used in combination with one or more of an anti miR27b antisense oligonucleotide, an anti miR-134 antisense oligonucleotide and a therapy inducing the Nrf-2/ARE pathway.

[0118] In some embodiments, the antisense oligonucleotide targeting adenosine kinase of the invention are to be used in compositions where they are the sole active ingredient, and in some embodiments, they are for use in compositions comprising other active pharmaceutical ingredients. The invention provides pharmaceutical compositions comprising the anti-andenosine kinase antisense oligonucleotide compounds of the invention further comprising a pharmaceutically acceptable carrier.

[0119] In some embodiments, the pharmaceutical compositions of the invention comprises the anti-adenosine kinase antisense oligonucleotide as the sole active pharmaceutical ingredient. In some embodiments, one or more active pharmaceutical ingredients are present in the pharmaceutical compositions of the invention.

### Dosages

[0120] The expression “effective dosage” denotes the dose of a drug that will achieve the desired effect. In the context of the present invention, the desired effect is lowering of the activity of adenosine kinase. Lowering of the activity of adenosine kinase can be measured by either measuring the level of adenosine kinase, for example when using oligonucleotides which result in degradation of ADK mRNA or ADK pre mRNA.

[0121] The compounds of the invention are for use in effective dosages, and the compositions comprise effective dosages of the compounds of the invention.

[0122] In some embodiments, the dosage of the compound administered at each dosing, such as unit dose, is within the range of 0.001 mg/kg-25 mg/kg.

[0123] In some embodiments, the effective dose is a dose that is sufficient to down-regulate adenosine kinase or the activity thereof, to a significant level over the time period between successive administration dosages, such as a level which is a therapeutic benefit to the subject. The pharmaceutical compositions of the invention may in some embodiments be made for administration to provide for an initial dosage build up phase, which may, depending on the disease pathology, be followed by a maintenance dosage scheme for the purpose of maintaining a concentration of the compound in the subject, such as in a target tissue of the subject, which will be effective in the treatment of the disease. The effectiveness of the dosages may in example be measured by observation of a disease parameter indicative of the state of the disease, or may depending on the target tissue, be measurable by observation of various tissue parameters, such as activity of adenosine kinase, or in alternative example on a measurable disease state dependent parameter in plasma.

### Drug Delivery

[0124] Various delivery systems are known and can be used to administer a therapeutic of the invention. Methods of administration includes, but are not limited to subcutaneous administration, intravenous administration, parenteral administration, nasal administration, pulmonary administration, rectal administration, vaginal administration, intrauterine administration, Intraurethral administration, administration to the eye, administration to the ear, cutaneous administration, intradermal administration, intramuscular administration, intraperitoneal administration, epidural administration, intraventricular administration, intracerebral, intrathecal administration or oral administration or administration directly into the brain or cerebrospinal fluid. The compositions may be administered by any convenient route, for example by infusion or bolus injection, by absorption through epithelial or mucocutaneous tissue (e.g., oral mucosa, rectal and intestinal mucosa, etc.) and may be administered together with or without other biologically active agents. Administration can be systemic or local. In addition, it may be desirable to administer the compositions of the invention into the central nervous system by any suitable route, including intraventricular and intrathecal administration. Intraventricular injection may be facilitated by an intraventricular catheter, for example, attached to a reservoir, such as an Ommaya or other reservoir approaches. Pulmonary administration can also be employed, e.g., by use of an inhaler or nebulizer, and formulation with an aerosolizing agent. Preferably, the therapeutic is delivered to the CNS or PNS.

[0125] Delivery means include inhaled delivery, intramuscular delivery directly into a muscle by syringe or mini osmotic pump, intraperitoneal administration directly administered to the peritoneum by syringe or mini osmotic pump, subcutaneous administration directly administered below the skin by syringe, intraventricular administration direct administration to the ventricles in the brain, by injection or using small catheter attached to an osmotic pump. Further, an implant can be prepared (e.g. small silicon implant) that will be placed in a muscles or directly onto the spinal cord. It may be desirable to administer the compositions of the invention locally to the area in need of treatment; this may be achieved for example and not by way of limitation, by topical application, by injection, by means of a catheter, by means of a suppository, or by means of an implant, said implant may be of a porous, non-porous, or gelatinous material, including membranes, such as sialastic membranes, or fibers.

### Pharmaceutical Compositions

[0126] The present invention also provides pharmaceutical compositions. Such compositions may comprise a therapeutically effective amount of the therapeutic, such as a therapeutically effective amount of the antisense oligonucleotides or siRNAs of the invention, such as anyone of SEQ ID NO: 2-80, and a pharmaceutically acceptable carrier. The term “pharmaceutically acceptable” may be defined as approved by a regulatory agency. The regulatory agency may for example be the European Medicines Agency, a Federal or a state government or listed in the U.S. Pharmacopeia or other generally recognized pharmacopeia for use in animals, and more particularly in humans. The term “therapeutically effective amount” may be defined as an amount of therapeutic which results in a clinically significant inhibition, amelioration or reversal of development or occurrence of a disorder or disease. The term “carrier” may refer to a diluent, adjuvant, excipient, or vehicle with which the therapeutic is administered. Such pharmaceutical carriers can be sterile liquids, such as water and oils, including those of petroleum, animal, vegetable or synthetic origin, such as peanut oil, soybean oil, mineral oil, sesame oil and the like. Water may be a preferred carrier when the pharmaceutical composition is administered intravenously. Saline solutions and aqueous dextrose and glycerol solutions may also be employed as liquid carriers, particularly for injectable solutions. Suitable pharmaceutical excipients include starch, glucose, lactose, sucrose, gelatin, malt, rice, flour, chalk, silica gel, sodium stearate, glycerol monostearate, talc, sodium chloride, dried skim milk, glycerol, propylene glycol, water, ethanol and the like. The composition, if desired, may also contain wetting or emulsifying agents, or pH buffering agents. These compositions may take the form of solutions, suspensions, emulsion, tablets, pills, capsules, powders, sustained-release formulations and the like. The composition may be formulated as a suppository, with traditional binders and carriers such as triglycerides. Oral formulation may include standard carriers such as pharmaceutical grades of mannitol, lactose, starch, magnesium stearate, sodium saccharine, cellulose, magnesium carbonate, etc. Such compositions may contain a therapeutically effective amount of the therapeutic, preferably in purified form, together with a suitable amount of carrier so as to provide the form for proper administration to the patient. The formulation may suit the mode of administration. Compositions for intravenous administration may be solutions in sterile isotonic aqueous buffer. Where necessary, the composition may also include a solubilizing agent and a local anaesthetic such as lignocaine to ease pain at the site of the injection. The ingredients may be supplied either separately or mixed together in unit dosage form, for example, as a dry lyophilized powder or water free concentrate in a hermetically sealed container such as an ampoule or sachette indicating the quantity of active agent. Where the composition is to be administered by infusion, it may be dispensed with an infusion bottle containing sterile pharmaceutical grade water or saline. Where the composition is administered by injection, an ampoule of sterile water for injection or saline may be provided so that the ingredients may be mixed prior to administration.

### EXAMPLES

[0127] Example 1. Synthesis of oligonucleotides that e.g. comprise LNA nucletides are well known in litterature. LNA monomer and oligonucleotide synthesis may be performed using the methodology referred to in Examples 1 and 2 of WO2007/11275.

[0128] Assessment of the stability of LNA oligonucleotides in human or rat plasma may be performed using the methodology referred to in Example 4 of WO2007/112754. Treatment of cultured cells with LNA-modified antisense oligonucleotides may be performed using the methodology referred to in Example 6 of WO2007/11275.

[0129] Example 2. RNA isolation and expression analysis from cultured cells and tissues is performed using the methodology referred to in Example 10 of WO2007/112754. RNAseq-based transcriptional profiling from cultured cells and tissues is performed using the methodology referred to in (Djebali et al. Nature 489:101-108 or Chu et al. Nucleic Acid Ther. 22:271-274 or Wang et al. Nature Reviews Genetics 10:57-63).

### Example 3: Cell Culture

[0130] The adherent human breast adenocarcinoma cell line MCF7 (ECACC no: 86012803) was purchased from ATCC (cat. no. HTB-22™) and maintained in Eagle's Minimum Essential Medium (cat. no: M2279, Sigma Aldrich, St. Louis, MO, USA) supplied with 10% fetal bovine serum (cat. no: F4135, Sigma Aldrich, St. Louis, MO, USA), 1% non-essential amino acids (cat. no: 11140050, Thermo Fischer Scientific, Waltham, MA, USA), 1% L-glutamine (cat. no: G7513, Sigma Aldrich, St. Louis, MO, USA) and 1% penicillin/streptomycin (cat. no: P4333, Sigma Aldrich, St. Louis, MO, USA) in Nunc™ EasYFlask™ Cell Culture Flasks (cat. no: 159910, Thermo Fischer Scientific, Waltham, MA, USA). The cells were kept in in a humidified 5% CO2 incubator at 37° C. and passaged twice a week.

### Example 4: Primary Screening of the Antisense Oligonucleotide Compound Library

[0131] A library of 79 antisense oligonucleotides was designed to adenosine kinase, both the long and the short isoforms (ADK-LS). The antisense oligonucleotides were synthesized by IDT (Coralville, lowa, USA) and diluted to a stock concentration of 500 UM in nuclease-free water (cat. no: AM9938, Thermo Fischer Scientific, Waltham, MA, USA) under sterile conditions. The resuspended oligonucleotides were stored at −20° C.

[0132] The day before transfection, the MCF7 cells were seeded in 24-well Nunc™ Cell-Culture Treated Multidishes (cat. no: 142475, Thermo Fischer Scientific, Waltham, MA, USA) at 1.25x105 cells/well. On the day of transfection, the cell medium was removed one hour before transfection and 475 μL of maintenance medium was added. All oligonucleotides were diluted to a final well concentration of 10 nM in Opti-MEM (cat. no: 31985-070, Thermo Fischer Scientific, Waltham, MA, USA). Lipofectamine™ RNAiMAX (cat. no: 13778150, Thermo Fischer Scientific, Waltham, MA, USA) was diluted in Opti-MEM to a final well concentration of 1.5 uL. Equal amounts of RNAiMAX and antisense oligonucleotide solutions were combined and allowed to incubate for five minutes before 25 μL of the mixture was added to the wells. As experimental controls, both a scrambled control oligonucleotide and RNAiMAX mock-treated cells were used. Forty-eight hours after transfection, RNA extraction was conducted using the RNeasy mini kit (cat. no: 74106, Qiagen, Hilden, Germany) as per manufacturer's instructions. Reverse transcription was conducted using Superscript IV reverse transcriptase (cat. no: 18090010, Thermo Fischer Scientific, Waltham, MA, USA) as per manufacturer's instructions, including gDNA removal by ezDNase™ (cat. no: 11766051, Thermo Fischer Scientific, Waltham, MA, USA) and using a random hexamer primer (cat. no: SO142, Thermo Fischer Scientific, Waltham, MA, USA). The qPCR was done on a QuantStudio 6 Flex (Applied Biosystems, Waltham, MA, USA) using Taqman assays (Table 1) synthesized by Integrated DNA Technologies (Newark, NJ, USA) and TaqMan™ Universal Master Mix II, no UNG (cat. no: 4440040, Thermo Fischer Scientific, Waltham, MA, USA) as per manufacturer's instructions. All assays were designed to be exon-spanning and specificity was confirmed by blast of the primers and the efficiency of primers was tested using a five-fold dilution series. Hprt1 was used as a house-keeping gene. The ADK assay used detects all mRNA variants.

TABLE 1
qPCR primers and probes

| Gene | Forward primer | Reverse primer | Probe | Cat.no: |
|---|---|---|---|---|
| ADK | CCAACATCCAGTT | AGCAGAATGAGCAG | /56-FAM/AGCTATGAG/ZEN/ | Hs.PT.56a. |
| | TTTCTCCAG | CCAAC | GGACCTGTTGTCACCA/3IAB | 25906602 |
| | | | KFQ/ | |
| Hprt1 | GCGATGTCAATAG | TTGTTGTAGGATAT | /56-FAM/AGCCTAAGA/ZEN/ | Hs.PT.58v. |
| | GACTCCAG | GCCCTTGA | TGAGAGTTCAAGTTGAGTTTG | 45621572 |
| | | | G/3IABKFQ/ | |

[0133] All data were calculated in Microsoft Excel and visualized in Prism ver. 9.1.1, (GraphPad, San Diego, CA, USA). qPCR results were analysed using the AACt method using cells mock treated with RNAiMAX only as a reference. The first screening (FIG. 1) was done with n=1 with two technical replicates and is depicted as mean±SEM. The top eleven candidates were chosen and the level of ADK-LS mRNA knockdown was confirmed in a follow-up experiment (n,N=2,3-4) depicted as mean±SEM in FIG. 2.

### Example 5: Dose-Range Knockdown of ADK-LS by Selected Antisense Oligonucleotides

[0134] The transfections and the qPCR were done as in example 4 except that the antisense oligonucleotide concentrations were either 5, 1 or 0.2 nM. The experiment was repeated giving one to two biological replicates with one to two technical replicates each.

[0135] FIG. 3 shows the results of the dose-response study.

### Example 6: Determination of IC50 Values for the Selected ADK-LS Antisense Oligonucleotides in Cultured Cell Lines

[0136] The transfections and the qPCR were done as in example 6, except that the cells were transfected with a range of antisense oligonucleotides concentrations in 3-fold dilutions from 90 nM to 0.004 nM. The relative level of ADK-LS as determined by qPCR was plotted against log (M) in Graphpad Prism (version 9.0.2, GraphPad Software). The dose-response curves were fitted using 3-parameter non-linear fit and IC50 values calculated in nM. The experiment was repeated giving two biological replicates with two technical replicates each.

[0137] FIG. 4 shows the dose-response curves and the IC50 values of ADK-LS antisense oligonucleotides.

### Example 7: RNA-Sequencing in Cultured Cell Lines

[0138] The transfection of cells was done as in above experiments with the exception that antisense oligonucleotide concentrations were 3 and 30 nM, respectively. The experiment was repeated giving three biological replicates. RNA was isolated from cell pellets using miRNeasy Mini Kit (cat.no: 217004, Qiagen), contaminant genomic DNA was removed by using the RNase-free DNase set (cat. no: 79254, Qiagen). The final RNA quality was evaluated using an RNA Nano chip on the Bioanalyzer 2100 (cat. no: 5067-1511, Agilent technologies, Santa Clara, CA, USA). Isolated RNA samples were rRNA depleted and prepared for sequencing using SMARTer Stranded Total RNA Sample Prep Kit-HI Mammalian (cat. no: 38229000, Takara Bio Europa). The rRNA depletion was performed using RiboGone and the remaining RNA was purified using AMPure XP beads (cat no. A63881, Beckman Coulter, Brea, CA, USA) and library construction was done according to the manufacturer's protocol. The final libraries were size-selected (150-500 bp) on a Pippin Prep (Sage Science, Inc. Beverly, MA, USA), quality controlled on the Bioanalyzer 2100 using the Qubit and high sensitivity chip (Agilent) and quantified using the KAPA library quantification kit (Kapa Biosystems, Wilmington, MA, USA). RNA-sequencing was performed on the Novaseq 6000 S4 at Novogene (Cambridge, UK).

[0139] Sequencing data were pre-processed by removing adapter sequence and trimming away low-quality bases with a Phred score below 20 using Trim Galore (v0.4.1). Quality control was performed using FastQC and MultiQC1 to ensure high quality data.

[0140] Quantification of gene expression was performed by mapping the filtered reads to the human genome (hg19) using STAR2. The software FeatureCounts was used to quantify the number of reads mapping to each gene using gene annotation from Gencode V373.

[0141] Differential expression analysis was performed using DESeq2 in R on gene expression levels4. Predicted gene targets for were found for each antisense oligonucleotide by in sillico analysis using GGGenome as referenced5. The sequence of each antisense oligonucleotide was matched against both mature spliced mRNA sequences (splice) and against unspliced pre-mRNA sequences (presplice) from RefSeq allowing up to a total of three insertions, deletions, or mismatches. The sum of insertions, deletions, and mismatches for each antisense oligonucleotide match were denoted as the “distance” (d) representing the quality of the predicted target site; d=0 means a perfect match and d=3 means three insertions, deletions, or mismatches in the binding between antisense oligonucleotide and (pre-) mRNA. Predicted mRNA and pre-mRNA antisense oligonucleotide targeting was compared to gene expression and differential expression analysis from RNA-seq to estimate which genes are differentially expressed due to antisense oligonucleotide off-targeting. All plotting was done in R.

[0142] To evaluate the effect of antisense oligonucleotide treatment on the ADK expression, the expression level was normalised and compared across samples (FIG. 7).

[0143] To evaluate the effects of the ADK-LS antisense oligonucleotides on the whole transcriptome, differential gene expression analysis was performed, and the resultant data visualized in volcano plots (FIG. 5 (SEQ ID NO 21) and FIG. 6 (SEQ ID NO 71)).

[0144] To examine whether a change in RNA expression could be ascribed to either 1) a direct effect by targeting other sequences in the transcriptome or 2) a downstream secondary consequence of the direct effects an initial in silico analysis was performed, using the antisense oligonucleotide sequences to predict all potential target sites within the 1) spliced transcriptome (cytoplasmic) and the 2) unspliced transcriptome (nuclear). This was done for either target sites with 0, 1, 2 or 3 insertions, deletions, or mismatches, collectively called the distance (d). A distance of 0 was only observed for antisense oligonucleotide binding to ADK RNA. The results are depicted in FIG. 8 (SEQ ID NO 21) and FIG. 9 (SEQ ID NO 71).

### Embodiments

[0145] 1 An RNA therapeutic compound comprising a contiguous nucleotide sequence of 10 to 30 nucleotides in length that is complementary to a nucleic acid sequence within an adenosine kinase transcript.
[0146] 2 The RNA therapeutic compound of embodiment 1, which is at least about 80%, at least about 85%, at least about 90%, at least about 95%, or about 100% complementary to the nucleic acid sequence within the adenosine kinase transcript.
[0147] 3 The RNA therapeutic compound of embodiment 1 or 2, wherein the adenosine kinase transcript is SEQ ID NO: 1.
[0148] 4 The RNA therapeutic compound of embodiment 1-3, wherein the RNA therapeutic compound is complementary to any one of SEQ ID NO: 164-205.
[0149] 5 The RNA therapeutic compound according to anyone of embodiments 1-4, wherein the compound is capable of reducing adenosine kinase protein expression in a human cell which is expressing the adenosine kinase protein
[0150] 6 The RNA therapeutic compound of embodiment 5, wherein the ADK protein expression is reduced by at least about 20%, at least about 25%, at least 30%, at least about 35%, at least about 40%, at least about 45%, at least about 50%, at least about 55%, at least about 60%, at least about 65%, at least about 70%, at least about 75%, at least about 80%, at least about 85%, at least about 90%, at least about 95%, or about 100% compared to ADK protein expression in a human cell that is not exposed to the compound.
[0151] 7 The RNA therapeutic compound of any one of embodiment 1 to 6, which is capable of reducing ADK transcript (e.g., mRNA) expression in a human or a mammalian cell, which is expressing the ADK transcript
[0152] 8 The RNA therapeutic compound of embodiment 7, wherein the ADK transcript expression is reduced by at least about 30%, at least about 35%, at least about 40%, at least about 45%, at least about 50%, at least about 55%, at least about 60%, at least about 65%, at least about 70%, at least about 75%, at least about 80%, at least about 85%, at least about 90%, at least about 95%, or about 100% compared to ADK transcript expression in a human cell that is not exposed to the compound.
[0153] 9 The RNA therapeutic compound of any one of embodiments 1 to 8, wherein the compound is an antisense oligonucleotide or an siRNA.
[0154] 10 The antisense oligonucleotide or siRNA of embodiment 9, wherein the antisense oligonucleotide or siRNA comprises one or more affinity-enhancing nucleoside analogs.
[0155] 11 The antisense oligonucleotide or siRNA of embodiment 10, wherein the one or more of the nucleoside analogs in the antisense oligonucleotide comprise a 2′-O-alkyl-RNA; 2′-O-methyl RNA (2′-OMe); 2′-alkoxy-RNA, 2′-O-methoxyethyl-RNA (2′-MOE); 2′-amino-DNA; 2′-fluoro-RNA; 2′-fluoro-DNA; arabino nucleic acid (ANA); 2′-fluoroANA, bicyclic nucleoside analog (LNA); or combinations thereof, or wherein the one or more of the nucleoside analogs in the siRNA comprise a 2′-deoxy-2′-fluoro modified nucleotide, a 2′-deoxy-modified nucleotide, 3′-terminal deoxythimidine nucleotides (dT), a locked nucleotide, an abasic nucleotide, a 2′-amino-modified nucleotide, a 2′-alkyl-modified nucleotide, a morpholino nucleotide, a phosphoramidate, and a non-natural base comprising nucleotide.
[0156] 12 The antisense oligonucleotide or siRNA of embodiment 10 or 11, wherein the one or more nucleoside analogs are affinity enhancing 2′ sugar modified nucleosides
[0157] 13 The antisense oligonucleotide or siRNA of embodiment 12, wherein the affinity enhancing 2′sugar modified nucleoside is an LNA.
[0158] 14 The antisense oligonucleotide or siRNA of embodiment 13, wherein the LNA is selected from the group consisting of constrained ethyl nucleoside (cEt), 2′,4′-constrained 2′-O-methoxyethyl (cMOE), u-L-LNA, P-DLNA, 2′-0,4′-C-ethylene-bridged nucleic acids (ENA), amino-LNA, oxy-LNA, thio-LNA, and any combination thereof.
[0159] 15 The antisense oligonucleotide or siRNA of any one of embodiments 1 to 14, wherein the antisense oligonucleotide or siRNA comprises one or more 5′-methyl-cytosine nucleobases
[0160] 16 An antisense oligonucleotide complementary to ADK pre-mRNA (SEQ ID NO: 1) comprising a sequence of 10-30 nucleotides in length, wherein the antisense oligonucleotide has at least one affinity-enhancing nucleotide analogue
[0161] 17 An antisense oligonucleotide according to embodiment 16, wherein said antisense oligonucleotide comprises at least one internucleoside linkage selected from any of a phosphorothioate, or a phosphodiester linkage, a phosphotriester linkage, a methylphosphonate linkage, or a phosphoramidate linkage.
[0162] 18 The antisense oligonucleotide according to embodiment 16 or 17), wherein the antisense oligonucleotide is complementary to both ADK-L and ADK-S pre-mRNA
[0163] 19 The antisense oligonucleotide according to any of embodiments 16-18, wherein the antisense oligonucleotide is capable of downregulating, such as knocking down expression of ADK-L and ADK-S.
[0164] 20 The antisense oligonucleotide according to any of embodiments 16-19, which comprises a motif that is complementary to any of SEQ ID NO: 164-205.
[0165] 21 The antisense oligonucleotide according to embodiment 20, wherein the motif is any one of SEQ ID NO's: 83-161.
[0166] 22 The antisense oligonucleotide according to any of embodiments 16-21, wherein the antisense oligonucleotide is a gapmer and contains a stretch of at least five contiguous DNA nucleotides.
[0167] 23 The antisense oligonucleotide according to any of embodiments 16-22, wherein the antisense oligonucleotide comprises a sequence of 14-20 nucleotides in length.
[0168] 24 The antisense oligonucleotide according to any of embodiments 16-23, wherein the affinity-enhancing nucleotide analogue is selected from the list of LNA, tricyclo-DNA, 2′-Fluoro, 2′-O-methyl, 2′methoxyethyl (2′MOE), 2′ cyclic ethyl (CET), UNA, 2′fluoro and Conformationally Restricted Nucleoside (CRN).
[0169] 25 The antisense oligonucleotide according to any of embodiments 16-24, wherein the antisense oligonucleotide, comprises at least one LNA.
[0170] 26 The antisense oligonucleotide according to any of embodiments 16-25, wherein the antisense oligonucleotide comprises from 20-55% LNA.
[0171] 27 The antisense oligonucleotide according to embodiment 26, wherein the antisense oligonucleotide further comprises one or more nucleosides that are anyone of tricyclo-DNA, 2′-Fluoro, 2′-O-methyl, 2′methoxyethyl (2′MOE), 2′ cyclic ethyl (CET), UNA, 2′fluoro and Conformationally Restricted Nucleoside (CRN).
[0172] 28 The antisense oligonucleotide according to any of embodiments 16-27, wherein the LNA is Beta-D-Oxy LNA.
[0173] 29 The antisense oligonucleotide according to any of embodiments 16-28, wherein all the internucleoside bonds are phosphorothioate bonds, and all modified cytosines are 5′-methyl-cytosine.
[0174] 30 The antisense oligonucleotide according to any of embodiments 16-29, wherein the antisense oligonucleotide is anyone of SEQ ID NO's 2-80, such as anyone of SEQ ID NO 4, SEQ ID NO 12, SEQ ID NO 20, SEQ ID NO 21, SEQ ID NO 37, SEQ ID NO 50, SEQ ID NO 51, SEQ ID NO 53, SEQ ID NO 59, SEQ ID NO 60, SEQ ID NO 63, SEQ ID NO 66, SEQ ID NO 67, SEQ ID NO 68, SEQ ID NO 69, SEQ ID NO 70, SEQ ID NO 71, SEQ ID NO 72, SEQ ID NO 73, SEQ ID NO 74, SEQ ID NO 75, SEQ ID NO 76, SEQ ID NO 77, SEQ ID NO 78, SEQ ID NO 79, or SEQ ID NO 80.
[0175] 31 A composition comprising the RNA therapeutic compound according to embodiment 1-15 or the antisense oligonucleotides according to anyone of embodiments 16-30.
[0176] 32 The RNA therapeutic compound according to any of embodiments 1-15 or the antisense oligonucleotide according to any of embodiments 16-30 or the composition according to embodiment 31, for use as a medicament.
[0177] 33 The RNA therapeutic compound according to any of embodiments 1-15 or the antisense oligonucleotide according to any of embodiments 16-30 or the composition according to embodiment 31, wherein said RNA therapeutic, antisense oligonucleotide or composition is for use as a medicament, preferably wherein said medicament is for use in the preventive, curative or disease modifying treatment, alleviation, pre-emptive treatment or prophylaxis of a disease wherein modification of ADK activity is beneficial.
[0178] 34 The RNA therapeutic compound according to any of embodiments 1-15 or the antisense oligonucleotide according to any of embodiments 16-30 or the composition according to embodiment 31, wherein said RNA therapeutic, antisense oligonucleotide or composition is for use in reducing or knocking down expression of ADK, such as ADK L/S in a cell or in an individual, such as in a human or a mammal.
[0179] 35 The RNA therapeutic compound, the antisense oligonucleotide or composition according to any of embodiments 1-31, wherein the use is for the preventive, curative or disease modifying treatment, alleviation, amelioration, pre-emptive treatment or prophylaxis of CNS or PNS disease.
[0180] 36 The RNA therapeutic compound, the antisense oligonucleotide or composition according to any of embodiments 1-31, wherein said antisense oligonucleotide or said composition is for use in the preventive, curative or disease modifying treatment, alleviation, pre-emptive treatment or prophylaxis of a disease of the CNS or PNS, such as a psychiatric, neurological disorder, a neurodegenerative disorder or a neurodevelopmental disorder.
[0181] 37 The RNA therapeutic compound, the antisense oligonucleotide or composition according to any of embodiments 1-31, for use as a neuroprotective agent.
[0182] 38 The RNA therapeutic compound, the antisense oligonucleotide or composition according to any of embodiments 1-31, for use in the preventive, curative or disease modifying treatment, alleviation, pre-emptive treatment or prophylaxis of a disease of the CNS or PNS, a psychiatric, a neurological disorders, a neurodegenerative disorders, a neurodevelopmental disorders, a central and peripheral nervous system diseases associated with cellular trauma and inflammation, neuronal damage, hippocampal damage, traumatic brain injury, a memory disorder, hippocampal sclerosis, Parkinsons Disease, multiple sclerosis, acute spinal cord injury, amyotrophic lateral sclerosis, ataxia, bell's palsy, Charcot-Marie-Tooth, a headache, Horton's headache, migraine, pick's disease, progressive supranuclear palsy, multi-system degeneration, a motor neuron disease, Huntington's disease, prion disease, Creutzfeldt-Jakob disease, corticobasal degeneration, primary progressive aphasia or symptoms or effects thereof.
[0183] 39 The RNA therapeutic compound, the antisense oligonucleotide or composition according to any of embodiments 1-31, for use in the preventive, curative or disease modifying treatment of epilepsy.
[0184] 40 The RNA therapeutic compound, the antisense oligonucleotide or composition according to any of embodiments 1-31, for use in the preventive, curative or disease modifying treatment of seizures.
[0185] 41 The RNA therapeutic compound, the antisense oligonucleotide or composition according to any of embodiments 1-31, wherein said antisense oligonucleotide or said composition is for use in the preventive, curative or disease modifying treatment, alleviation, pre-emptive treatment or prophylaxis of epilepsy and/or seizures, preferably a treatment resistant epilepsy, acquired, genetic and/or idiopathic epilepsy, therapy resistant epileptic syndromes, drug resistant epilepsy, pharmacy resistant focal epilepsy, spontaneous seizures, therapy resistant seizures, focal epilepsy, generalised epilepsy or status epilepticus.
[0186] 42 The RNA therapeutic compound, the antisense oligonucleotide or composition according to any of embodiments 1-31, for use in the preventive, curative or disease modifying treatment, alleviation, pre-emptive treatment or prophylaxis of epilepsy, drug resistant epilepsy, pharmacoresistant focal epilepsy, seizures, spontaneous seizures, therapy resistant seizures, focal epilepsy, preferably wherein said focal epilepsy is focused in the frontal lobe, the parietal lobe, the occipital lobe or the temporal lobe, generalised epilepsy, preferably wherein said generalised epilepsy is selected among absences, myoclonic seizures, tonic-clonic seizures, tonic seizures, atonic seizures, clonic seizures and spasms, status epilepticus, epileptogenesis induced by acute brain injury, autosomal dominant nocturnal frontal lobe epilepsy, continuous spike-and-waves during slow sleep, dravet syndrome, epilepsy developed after apoplexy, epileptic encephalopathy, gelastic epilepsy, absences, benign neonatal seizures, Jeavons syndrome, Juvenile myoclonic epilepsy, Landau-Kleffner Syndrom, Lennox-Gastaut syndrome, Mesial temporal lobe epilepsy, myoclonic astatic epilepsy, Ohtahara Syndrom, Panayiotopoulos syndrome, PCDH19 syndrom, benign childhood epilepsy with centrotemporal spikes, Sturge-Weber syndrome, symptomatic focal epilepsy, transient epileptic amnesia and West syndrome, and/or glioma-associated epilepsy.
[0187] 43 The RNA therapeutic compound, the antisense oligonucleotide or composition according to any of embodiments 1-31, for use in the preventive, curative or disease modifying treatment, alleviation, pre-emptive treatment or prophylaxis of pain, preferably wherein said pain is a chronic pain, a neuropathic pain, a chemotherapy-induced neuropathic pain, a migraine, a headaches, hyperalgesia, allodynia and/or fibromyalgia.
[0188] 44 The RNA therapeutic compound, the antisense oligonucleotide or composition according to any of embodiments 1-31, for use in the preventive, curative or disease modifying treatment of pain.
[0189] 45 The RNA therapeutic compound, the antisense oligonucleotide or composition according to any of embodiments 1-31, for use in the preventive, curative or disease modifying treatment, alleviation, pre-emptive treatment or prophylaxis of pain, chronic plain, neuropathic pain, chemotherapy-induced neuropathic pain, migraine, including migraine with aura and migraine without aura, a primary headache, a tension headache, a cluster headache, Hortons headache, a chronic daily headache, a sinus headache, a posttraumatic headache, an exercise headache, hemicrannia continua, hypnic headache, hyperalgesia, thermal hyperalgesia, allodynia, tactile allodynia and/or fibromyalgia.
[0190] 46 The RNA therapeutic compound, the antisense oligonucleotide or composition according to any of embodiments 1-31, for use in the preventive, curative or disease modifying treatment, alleviation, pre-emptive treatment or prophylaxis of a psychiatric disorder, a cognitive disorder, a sleep disorder, a cardiovascular disorder, a respiratory disorder, a cancer, a renal disorder, an inflammation or a metabolic disorder.
[0191] 47 The RNA therapeutic compound, the antisense oligonucleotide or composition according to any of embodiments 1-31, for use in the preventive, curative or disease modifying treatment, alleviation, pre-emptive treatment or prophylaxis of a psychiatric disorder, a neuropsychiatric disorder, anxiety, depression, bipolar disorder, attention deficit hyperactive disorder, attention deficit disorder, autism, Asperger's, Tourette, schizophrenia, paranoid schizophrenia, hebephrenic schizophrenia, catatonic schizophrenia, undifferentiated schizophrenia, residual schizophrenia, simple schizophrenia or unspecified schizophrenia.
[0192] 48 The RNA therapeutic compound, the antisense oligonucleotide or composition according to any of embodiments 1-31, for use in the preventive, curative or disease modifying treatment, alleviation, pre-emptive treatment or prophylaxis of a cognitive disorder, cognitive impairment, dementia, Alzheimer disease, vascular dementia, frontotemporal dementia or Lewy bodies dementia.
[0193] 49 The RNA therapeutic compound, the antisense oligonucleotide or composition according to any of embodiments 1-31, for use in the preventive, curative or disease modifying treatment, alleviation, pre-emptive treatment or prophylaxis of a sleep disorders.
[0194] 50 The RNA therapeutic compound, the antisense oligonucleotide or composition according to any of embodiments 1-31, for use as a sleep modulating agent.
[0195] 51 The RNA therapeutic compound, the antisense oligonucleotide or composition according to any of embodiments 1-31, for use in sleep promotion.
[0196] 52 The RNA therapeutic compound, the antisense oligonucleotide or composition according to any of embodiments 1-31, for use in the preventive, curative or disease modifying treatment, alleviation, pre-emptive treatment or prophylaxis of a cardiovascular disorders, a peripheral artery disease, postoperative atrial fibrillation, heart failure, chronic heart failure, intracerebral haemorrhage-induced brain injury, stroke, cerebral ischemia or ischaemia.
[0197] 53 The RNA therapeutic compound, the antisense oligonucleotide or composition according to any of embodiments 1-31, for use in the preventive, curative or disease modifying treatment, alleviation, pre-emptive treatment or prophylaxis of a respiratory disorder, asthma or chronic obstructive pulmonary disease.
[0198] 54 The RNA therapeutic compound, the antisense oligonucleotide or composition according to any of embodiments 1-31, for use in the preventive, curative or disease modifying treatment, alleviation, pre-emptive treatment or prophylaxis of a cancer, a cancer in the nerve system, glioma, glioblastoma, hepatic cancer or a cancer metastasis.
[0199] 55 The RNA therapeutic compound, the antisense oligonucleotide or composition according to any of embodiments 1-31, for use in the preventive, curative or disease modifying treatment, alleviation, pre-emptive treatment or prophylaxis of a renal disorder, renal injury, renal inflammation, albuminuria or glomerular injury.
[0200] 56 The RNA therapeutic compound, the antisense oligonucleotide or composition according to any of embodiments 1-31, for use in the preventive, curative or disease modifying treatment, alleviation, pre-emptive treatment or prophylaxis of inflammation.
[0201] 57 The RNA therapeutic compound, the antisense oligonucleotide or composition according to any of embodiments 1-31, for use in the preventive, curative or disease modifying treatment, alleviation, pre-emptive treatment or prophylaxis of an inflammatory disorder, oxidative stress, inflammation, apoptosis, arthritis, osteoarthritis, rheumatoid arthritis, and the pain associated with these conditions, encephalitis, meningitis, human Rasmussen encephalitis, inflammation of cerebral cortex and/or hippocampus, progressive cognitive deterioration, colitis, ulcerative colitis or inflammatory bowel disease.
[0202] 58 The RNA therapeutic compound, the antisense oligonucleotide or composition according to any of embodiments 1-31, for use in the treatment, alleviation, pre-emptive preventive, curative or disease modifying treatment or prophylaxis of a metabolic disorder, preferably diabetes, more preferably type 1 or type 2 diabetes.
[0203] 59 The RNA therapeutic compound, the antisense oligonucleotide or composition according to any of embodiments 1-31, for use in the preventive, curative or disease modifying treatment, alleviation, pre-emptive treatment or prophylaxis of Prader-Willis Syndrome, Anglemans Syndrome, neurofibromatosis, an angiogenesis related disease, promotion of angiogenesis, a disorder of the retina, preferably diabetic retinopathy or hearing loss.
[0204] 60 The RNA therapeutic compound, the antisense oligonucleotide or composition according to any of the preceding embodiments, wherein said antisense oligonucleotide or composition is administered by systemic administration, subcutaneous administration, nasal, intrathecal administration, intraventricular administration into the CNS or intravenous administration.
[0205] 61 The RNA therapeutic compound, the antisense oligonucleotide or composition according to any of the preceding embodiments, for use in combination with one or more other active pharmaceutical ingredients for the preventive, curative or disease modifying treatment of any of the diseases of embodiments 33-60).
[0206] 62 The use according to embodiment 61, wherein the other active pharmaceutical ingredient is an ingredient made for preventive, curative or disease modifying treatment of the diseases of any of embodiments 33-60).
[0207] 63 The use according to embodiment 61 or 62, wherein the other pharmaceutical ingredient is an antisense oligonucleotide targeting miR-27b or miR-134.
[0208] 64 A pharmaceutical composition comprising an effective dosage of the antisense oligonucleotide according to anyone of the preceding embodiments and a pharmaceutically acceptable carrier.
[0209] 65 A pharmaceutical composition comprising an effective dosage of the RNA therapeutic compound, such as the antisense oligonucleotide according to anyone of the preceding embodiments, wherein said antisense oligonucleotide is the sole active pharmaceutical ingredient.
[0210] 66 The pharmaceutical composition according to embodiment 64 or 65, wherein the composition is for use according to any of embodiments 33-63.
[0211] 67 The pharmaceutical composition according to any of embodiments 64-66, wherein the composition is for intratecal administration, or for intracerebroventricular administration.
[0212] 68 The pharmaceutical composition according to embodiment 67, wherein said composition is administered in a pump, preferably wherein said pump is a mini pump, more preferably wherein said mini pump is a mini-osmotic pump.
[0213] 69 The pharmaceutical composition according to any of embodiments 67-69, wherein said composition is for intraventricular administration facilitated by an intraventricular catheter, preferably wherein said catheter is attached to a reservoir, preferably wherein said reservoir is an Ommaya reservoir.
[0214] 70 The pharmaceutical composition according to any of embodiments 64-69, wherein said composition is administered with an interval of anyone of 1 day, 2 days, 3, 4, 5, 6, 7, 8, 9, 10, 11, 12, 13, 14, 15, 16, 17, 18, 19, 20, 21, 22, 23, 24, 25, 26, 27, 28, 29, 30, 31, 32, 33, 34, 35, 36, 37, 38, 39, 40, 41, 42, 43, 44, 45, 46, 47, 48, 49, 50, 51, 52, 53, 54, 55, 56, 57, 58, 59, 60, 61, 62, 63, 64, 65, 66, 67, 68, 69, 70, 71, 71, 72, 73, 74, 75, 76, 77, 78, 79, 80, 81, 82, 83, 84, 85, 86, 87, 88, 89, 90, 91, 92, 93, 94, 95, 96, 97, 98, 99, 100, 101, 102, 103, 104, 105, 106, 107, 108, 109, 110, 111, 112, 113, 114, 115, 116, 117, 118, 119 or 120 days.
[0215] 71 The pharmaceutical composition according to any of embodiments 64-68, wherein said composition is administrated with an interval of between 1-200 days, 10-190 days, 20-180 days, 30-170 days, 40-160 days, 50-150 days, 60-140 days, 70-130 days, 80-120 days, 90-110 days or preferably about 100 days.
[0216] 72 The antisense oligonucleotide or the composition according to any of embodiments 1-31, for use in a method of treating the diseases according to any of embodiments 33-60.
[0217] 73 A method of treatment of the diseases according to any of embodiments 33-60, by use of the RNA therapeutic compound, the antisense oligonucleotides according to any of embodiments 1-30 or the composition according to embodiment 31 or the pharmaceutical composition according to any of embodiments 64-71.
[0218] 74 The use according to any of embodiments 33-63, or method according to embodiment 73, wherein the treatment is anyone of preventive, curative or disease modifying.
[0219] 75 A method of diagnosing a disease according to any of embodiments 33-59 by use of the antisense oligonucleotide according to any of embodiments 16-30 or the composition according to embodiment 31.

1. An antisense oligonucleotide or siRNA comprising a contiguous nucleotide sequence of 10 to 30 nucleotides in length that is complementary to a nucleic acid sequence within a adenosine kinase (ADK) transcript.

2-17. (canceled)

18. The antisense oligonucleotide or siRNA of claim 1, wherein the ADK transcript is SEQ ID NO: 1.

19. The antisense oligonucleotide or siRNA of claim 1, wherein the compound is an antisense oligonucleotide or siRNA complementary to ADK pre-mRNA (SEQ ID NO: 1), and wherein the antisense oligonucleotide or siRNA has at least one affinity-enhancing nucleotide analogue and, wherein said antisense oligonucleotide or siRNA comprises at least one internucleoside linkage selected from any of a phosphorothioate linkage, a phosphodiester linkage, a phosphotriester linkage, a methylphosphonate linkage, or a phosphoramidate linkage.

20. The antisense oligonucleotide or siRNA according to claim 1, wherein the antisense oligonucleotide or siRNA is complementary to both ADK-L and ADK-S pre-mRNA.

21. The antisense oligonucleotide or siRNA according to claim 1, wherein the antisense oligonucleotide or siRNA is capable of downregulating expression of ADK-L and ADK-S.

22. The antisense oligonucleotide or siRNA according to claim 1, wherein the antisense oligonucleotide or siRNA is capable of knocking down expression of ADK-L and ADK-S.

23. The antisense oligonucleotide or siRNA according to claim 1, wherein the antisense oligonucleotide or siRNA comprises a sequence of 14-20 nucleotides in length.

24. The antisense oligonucleotide or siRNA according to claim 1, wherein the affinity-enhancing nucleotide analogue is selected from LNA, tricyclo-DNA, 2′-Fluoro, 2′-O-methyl, 2′-methoxyethyl (2′-MOE), 2′ cyclic ethyl (CET), UNA, 2′-fluoro or Conformationally Restricted Nucleoside (CRN).

25. The antisense oligonucleotide or siRNA according to claim 1, wherein the antisense oligonucleotide or siRNA comprises at least one LNA.

26. The antisense oligonucleotide or siRNA according to claim 1, wherein the antisense oligonucleotide or siRNA is complementary to one of SEQ ID NO's 164-205.

27. The antisense oligonucleotide or siRNA according to claim 1, wherein the antisense oligonucleotide or siRNA comprises any one of SEQ ID NO's 83-161.

28. The antisense oligonucleotide or siRNA according to claim 1, wherein the antisense oligonucleotide is anyone of SEQ ID NO's 2-80.

29. The antisense oligonucleotide or siRNA according to claim 1, wherein the antisense oligonucleotide or siRNA is selected from anyone of SEQ ID NO 4, SEQ ID NO 12, SEQ ID NO 20, SEQ ID NO 21, SEQ ID NO 37, SEQ ID NO 50, SEQ ID NO 51, SEQ ID NO 53, SEQ ID NO 59, SEQ ID NO 60, SEQ ID NO 63, SEQ ID NO 66, SEQ ID NO 67, SEQ ID NO 68, SEQ ID NO 69, SEQ ID NO 70, SEQ ID NO 71, SEQ ID NO 72, SEQ ID NO 73, SEQ ID NO 74, SEQ ID NO 75, SEQ ID NO 76, SEQ ID NO 77, SEQ ID NO 78, SEQ ID NO 79, or SEQ ID NO 80.

30. The antisense oligonucleotide or siRNA according to claim 1, wherein all internucleoside bonds are phosphorothioate, all modified nucleotides are LNA and LNA cytosine are 5-methyl-cytosine.

31. A method for reducing or knocking down expression of ADK, said method comprising administering the antisense oligonucleotide or siRNA according to claim 1 to a cell, mammal, or human subject.

32. The method of claim 31, wherein said ADK is ADK-L or ADK-S.

33. A method for the amelioration of a disease of the central nervous system (CNS) or the peripheral nervous system (PNS), said method comprising administering the antisense oligonucleotide or siRNA according to claim 1 to a subject that has a disease of the CNS or PNS.

34. A method for the amelioration of epilepsy or neuropathic pain, said method comprising administering the antisense oligonucleotide or siRNA according to claim 1 to a subject that has epilepsy of neuropathic pain.

The application's sequence listing, which the Patent Office published only in electronic form, follows.

SEQUENCE LISTING (209 sequences)

SEQ ID NO: 1 - RNA, 558762 nt, Homo sapiens
  source 1..558762: mol_type = mRNA
gatgcgaagagggggcgggaccagagagtggatggcagaggtgggctgtagagccaaagtggggtgggagcgcgaagatggcagctgctgaggaggagccgaagcccaaaaagctgaaggtggaggcgccgcaagcgctgaggtgagcgctgccggacttggggaggagggtgacggcgctgcaagcaagccagggcccacgtggggttgcacggccccgacgctgggtggtgtctctcactgccagcttggggccaacacgcaggacctcccccagctgcccgcttggccgcgaccccttgccagacgttctctccgtttggctgagtccccgcctgtctggtgcagctccggctccagcagcccttcgccagtcgtggcccgcagggggaccgagctggctgaccgcgccacctgcgagcaagcccaggctgggctggtgcgaccccggagggtcggaccggagcagcgtctgtaggcggccgccttctcttcccgggggatggcgggaaagaggctcggcaactgctgtacactggggcaaagtcagaattcttggggatttttcagagtgttgcggaagggcacgttgaccttccttttcgtgcacattctgaaagcccgtacctttgaggaccctctaccagggacccagacccctccgatgctttgcaggggcagcatttggatgaatggataggaaaggttgatttctcttttttatttacactttttggcagcaacggggacagtgctgcccctaacacctgcctcacatgtgattgatgttgcaacttttacttatgaagagtcatttgttaaaatatcccttcctaataagtataaagtgaagcaggcagtctttgatgatttggaaatgttcgctgaaaggcagcgatttttttttccatcttaaaatagacatatcaaactgatttaaaactattaggacactcctgattaaacaggacatatcccatttcttccagtatcactcttcttcacctccaaaggaaggaatcactcacaattgaaaagaaaaggacacttaggggcctggtggtgtgttcatgctgctttgaatggagggtgaacaaatccttgccagttcctttaatgtattcctactaccctcaaagggttagtgtgcctaccttataccaagaacataaactttaaaataaaaaccctcaggatattctatttttattttaaatattccaactatatgcagaataaaaagcaacggcttttgaatcagacctacctgagttcaaggcatgtgctttccctactctgccctttattagagtatttccttataaggcacctccttcgccaaactggaagacagatgcaacttttccctaccatcctactgaacatataacccttagatttccttagatttttccttaataaaaattattatatataatgctgatccattttcactgtgttttcctatttattatcttgttggacagttctgtgatcaaaggaaggcaagaattatgcctattttacaattgaagatattgaagcccaaataaaacaattagtacaggaacagaaataggaactagctgagcatgttttcttatacctgcagtcctggtgctttgtgaggctgtggtgagagcattccttaggcaactaaaattcactttatacaatatgaatttagtgccacctgtagacatgaagttaaaagattagacacttgagtactgggacaaatctctaattttgtggggagacattttaggatcggctattattacttttattatattaatttgctttcagactcaaagtgtgataatgcattgagtatttacactgaatttatgatgacttgcttgacaggggattgctactggttttggttaaggagaatggattataaagactttgcataatttaatgtgcagcatcagtgggaacaaataatgagatatatttgtagatgtcaggaaaaatatttagatttagggatttgtgagaatttggtcagctctgggataataattctccaccaggggaaattttgccctccaggggacatttggcgtggtctagaaagatatttttggtagggagagctattggcacctagtggatggaattcaggggtgctgctaaacatgctacataggacaacccccacaacaaagaattatctggccaaatacgtcaacggtgttgaggttgagaaatctgttctagagggagcatctgacaagactagtctgcctttctcaaatatctattatttttctaggctcggttgcttttcagcatataacagttgcttataaagaaagaatcaggctctgacatgttttcacgtgggattaggggaaagaagggaacgttaattgagtgctagacattatactatgtgctctatatatgttatctcttttaaccctcccagtgacctatgaggtaggagcaatgattcctgtgttacagacgagctattttgtgatgaaagaagtggagaaacatttttgggaactgctccctagatgaaggtgttccatgatgatcacttatatttaagacaacttagttttcttttctctcctttggaaatctcatccaagttcatttctttagcgatcgcctcttaagaggctacagtgccttccaaggcttgttgagcacgtgccaagtcttttccttcagtttgtctttcaagtacatgctattttagacatggtgttaaaaactggatatatatagagagagaaagaggtaaggcacaggtaccatcctcttggtgggaaataagtggggtttgggaaaatgacacctgagtattcttaaagatgactaggagttaaccagtcatctgtgactgtagggtatctgtgaagtagggtatctgccttataggaaagtttgtttggtggcagaactgggagagagctgcctcttggggaagtgcagatagtctgactgaagcagagatgtatggggtccaggctttgtattagacactctcacatgtgtcctttctatctctgtgcctctcagttctcagatcttaatttaatttaattttgtatatatttttgagttggagtctcactctggcgcacaggttggagtgcagtggcaccatctcggctcactgcaacctctgcctcctgggttcaagcaattctgctgcctccgcctcccaagtagctgggattacaggcgtacaccactatgcctggctaatttttgtatttttagtagagacgggattttgccatgttggctaggctggtcttgaacttctgacctcaagcgatccacctgcctcagcctcccaaagtgttgggattacaggtgtgagccaccgtgccctgccttcccagaccttaatttttactgtctgctgagtatgtgcttctgagtgactttctgacatttcgaagtcatatataccaaactaaattatctgttatcctgaatctgtgcatttttccatatttcctgcatctgttaatggcaccagtaacctcctttactccaaagtttgagacctagatatttgattcattttacatccacattataatgtctttccttttccattcctgctgccacaccttacgtttagactttatcttttgcttagattttgttttgacttcctaagcagtctctttaccttcagcctcaagttctgcctacttttctttaggcacagctctacttattcatcacggcaaatatttgtaaactctgaagttgatgttaggaaacgttgaatcctgaaagcccatatcattactccatctgacattagcaattaaggattattaaggatcatgacttttaatagtactaaaaaggaaacaaactacagttctctaatcagcaaatgctgagcttttctcaaatattgcttcctaactgtttcacttccatggaccccttttattattttcctctatctcctacctcactatggaccctgtgttctaaaattaaacctaggagctgggcatggtggctcacacctacattccagcactttgggaggccaaggtgggaggtttgcttgaacccagaagttcgagaccagtctgggcaacaaaatgagaccctcgaatctttaaaaaaaacgaaacaaaaactagctggacatggtggcataagcctgtggtcccagctacacaggaggctgaggcaggaggattccttggcttcccaaagtgctgggattacacgtgtgagccaccaagcctggccttaattaatgtttgttgcatagagtggcactgataactttcatttttctagaccctatatatatatttttttgtttgtttgtttttgtttttgagacagagtctcgctctgtcgcccaggctggagtgcagtggcacagtctcggctcactgcaagctccgcttcccgggttcatgccattctcctgcctcagcctctgagtagctgggactacaggcgcctgccatcacgcccggccaattttttgtatttttaatagagacggggtttagtagagacgtgttagccgggatggtcttgatcgcctgacctcgtgatccacccgcctcagcctcccaaagtgctggattacaggggtgagccaccgtgcccggcgaccctatacttttaataatgcagcctaaaattgagctttgctactattttcttttttcatcatgataatctactattgaaagagtttggttatttttggatgatattgcatgccttttacttatattcgcaaatttaatcctttaagattaaggctttgggctatgaaggaatggaaaacaaaagtcccctaatgcacttagtatgaatgccttaataagatcctttcctgggcaatatatactagtgcagcgtgagggtggtagagagagccagaggaaagcttgcatggatggttctgggtatccagggacaagcatggaagtgcttgaaactcagggaaagtgggaagggccttaggaaaacaaggggcattgaagactatgtttcttattttgggtacaggcctagactgaatattcagcctcaaataaaacatgaggctgatgtgctgcttttttttacctggaatatgtctttgctttacttccatcaattaaaatcctggccacatggtgtggctcatgcctgtaatcccagcactttgggaggccaaggtgggaggattgcttgaggccaggagttctagactggcctgggcaacatagtgagaccctagctctacaaaaataaacttagccaggcatggcagcaggttcctgttgtcccaaccactctggaagctgaggcactggcactactacattccagcctgggtaacagcaagactctgtctcaaaaaaagaaaacaaaatatctttcctgtgtccaaagtgtttacagttaggtgggggaaaaaaagtatcaaaattttaaagagcattctggtcagaatggatcccagtagagcagtggttaagagcatggtctctggcatcagctatctggtttgacccttgatccttattagctagtgatctcgggaagattggctacttgccccatacctcttttctcacctgtaaaatgggtatagtaatagtacgaacctcataaggatgttgagagggaaacgcagcaattaaaaatttaaaaaggaaaggaaaagatatagatatactcaagaacaagataaacatctccagggaccaagaacagaaaagaaacatgcagttagactctgggttcaggagctagtagaaataacatgtaggggacctagggtcagatgctctgtatgaaactgaagctgggctgagactggatgaaagagggctgaaaacatctgctcttggctgttgctttaaaaagctgtggacctggagtgaagatgcagaagtggctgagctgccagatggctcagagtcaggaactgtggtttccccactatcagctagtacaagagcaccaagcttggaggtcgtggactctggaagaggggtggcctatcacagaacccctgggaaaagagggaatgtctgagcctataaacacacgaggaagaccattacttagaaaattaacacagttaccaagagataaattcacaaaaaatctgatggaaatatgggtaatttcaaaacaattgtaagtattttaaagatccttaaaaaagataaaagaaataatggtcataaaaaaacatgaatcaaaaataggtagatatgaaatagatggctatattaaagaaaaaatggaattattgaaattaaaaaaaaaataggtcagttgaactctagaccagacaaatttgaagggaaaattaatgaattggaagaaagtacccagatgtatcacagagaaataaataggaattaacaaatatgagctgggcgtgatggctcatgccggtaattccagtactttgggaggccaaggcgggcagatcacctgaggttgggaatttgagaccagcctgaccaacatggagaaactccatctttactaaaaaaaaaaaaaaaaaaatacaaaattagctggatgtggtggtccatgcctataatcccagctactcaggaggctgaggcaggagaatctcttgaacccgggaagtggaggttggggtgagccgagatcgtgccattgcactccagcctgggcaacagcgcaactccataaattgagaggcaccaacttacatctaactgggagttccaaaaagaggaaataatgtgaatggtggagaagccaggttggaagagctgatggctgagaatttaccaaaatttaagaaagaccagttctcagcttgaaagggcattatatgtatctagtaagatggaaacaaaaatataaactaaaacttcagagattttcttgctaattatattaatgtatctattatagaaagactgaaaatttagacactccaaatttaatagtgggcatctttaggtggaagaattatgaggtttaaaaaaaaacttgtattttccaatgtttctacactgaacatattaggaatcttgcttttaagttggagagacttgaagtacactgaatatataagtggccaagtgctgtgtggctaaatattatctttacagaatggacctctgggataccaaatacctctgaaacttggtaacataattattatgactttattgtaggctataatcttttaagctatatttctgaaatcccaaagctctggaagctggaagttttttaaaaagtttgagatgaattaatttggcagcaaaatttgaactgatgtaaaggtgtcagtagtatttatttgtctgacacaaatgtatatgctttgctatggaaatattaggctgttaatgacatgccacatgaattcctcctgggtgttctacaaaatatatagtgcagtgttaccttcctaaaatccataaaattctgaattccaaaacataccctgccccaaggatttaagaaagggtttgtggacttttattacttatttatagtttacttttaaaagttggctactgtgcaggaacaataatttctcatcagagttagttcctagatttttttctctagtcactgttctgcacttctatgatactaagtagatgctcatttcaaagatactttttggctagctctactgtaataccagtacagttgatgtcactgagttattaggcttttcttcctctccagtagtaactgaaaagacagacttctcttcaacttttggacttgaagatttggaaggctgttttacaaaatggtctcccaaactgaagtttcacatactgcttgaagaagatacattctgatgatttatcaaagcagatttagagtttttgctctcatttatgtgtattatttctgatgttgtttgtacttttggcttcgtaccatttctttaaaaatttggttcatacacttcagatctagaagcaatgtgattagcctttgatataagaacatctgagtttctatttgcatttttactttcattgcatgcatgctgactttagtattttctttacaatttagaagatatatatgtatagcaattatgtaagaaattcttgccttctgtaggcacaacagtttggttactgtattaacatggtcttaaccattttgtcagcaagccacatttggttagtagtgagtcctgctattttactatgttacctgcaaacaggattgcagatgtgaaggtagcctgtgtgatcattggtcactcactgaattagggattatcagaaattatattgaagtggtcacttggctacttgccttctacatgcttaggctagactttggttcatacttagaaccattttgaaatctctgaaagactcagttgactcaacctaactggaaagtccatctaatttttttttttttgagatggagtcttgatctgtcacccaggctggagtgcggtggcacgatctcagctcactgcaacctccgcctcctgggttcaagcaactctcctgcctcagcctcccgagcagctgggattacaggcatgcaccaccatgcccagctactttttgtatttttagtagagacagggtttcacaatgttggccaggctggtctcaaatgcctgacctcaggtgatccacctgccttggcctcccaacgtgctgggattacaggtgtgagccacagcacctggcctaaagtccatctaaatatgactcaatctaggagttcaccgcttgtctctgttgtcctttagattcaatttatctctcacgtaggccatttcagtgtaacaagatggcagttctcaactccaagccaaaatctcatgagtccaaaggaagagagtttttctatatgcttgtatcagttttgagagaaatttggttctgcctgtgttacacactaccttgaaccagttgaggtaggaggtggggctcagacactggaccaaattgaggactagctaaaacagggacagagtggaatcagctttccgtaagtcacacctactaatgtgccatgtcagtttcccattgccacggcaacacccagaagttagcgtcccttttcatgacagtgtcctggaagttaccacccttttcctagaaatttctgcataatctgcctcttaatttgtatataattaaaattgggtataaatatgaccacagaactgcttctgagctgctactctgggcatactgcctatggggtagccctgctctgcaaggggcagtacctctgccgatgctttacactgctgcttcaataaaagttgctgacacaccactggctgacccttgaattttttcctggatgaagccaagcaccgtcctgggctaagccccagttctggggcttacctgccctgcattacaatcactgtatcagaggtggagatttgggctggccttggatacattctcactgtctgcccgtctgttgtgtgcgtgcatgcaggtaggggtgtgtgcgtgcatgcaggtaggggtgtgtgtgtgtgtgtgtgtgtgtgtgtatgtgtgtgtgtaggtagtactaggtatatggggagccagtgagtgtaggcattgttcgtatatggggggaaatggatgggtgttgatgggtacactgtaatcaacaactccgacaggaccttgtagagtaagggaggtagtgtcattccctcagcaagagaaaaatccattttagcatgtacaatatttattaaaacaaccttcctcttctccccttccaaaaaacccgacaacctcagtcttcaaggtctagccaaattctctcttctctataaaacttttctactcaccaaacctagaaatggtttctcctttgactgtttgtactttatactttgcgttattgcaatgtacagtatgtgcatgttttatctcacctattgctacttgaagttgggaaactagttgaataactcttagtgcctcataactgatcacttcattgcaatataacaggctctgaatttctgttgaatcaaggaattcctatttatttttttgagatgaagtctcgctctgctgcccagactggagttcagtggcatgatctcggctcactgcaacattcacctctcaggttcaagcaattctcctgcctcagcctcccgagtagctgggactacaagtgcacaccaccacacctggctaaatttgtgtatgtgtgtgtttttagtacagacggggtttcactgtgttagccagtatggtctcgatctcctgatctcgtgatctacctgcctcaacctcccaaagtgctgggattacaggcatgagtcaccgcgcctggcctatttattttaaaattttaattaattttttttttgtttttagagacagggtttcactatgttgcccatgctggtcttgcctatgcctgtcttgaactcctggcctcaagtgatcttccctctcagcctcccaaagtgctgggattacaggtgtgagcaaccattcctggcagaatcagggaattcttaacactttttttttttgttttttttgagatgagggggtcttgctgtgttgcctaggctggagtgcagtggtacaatcatggctcactgcagctttgacctcccaggctcaagcgatcctcctatctcagcctccagagtagctggaactacagggatgcaccactgtgcccagctaattaaagaaaaaattttcttttgtagaaacagggtctcactctattgcccaggctggtcttgaactcaagcagtcctcctgcctcggcctcctaaagtgctaggattacaagcctgagctgcatgcctggcctcttaaccctttaaagatttttttgtttgttttttagacagagtttcactcttgttgaccaggctggagtgtagtggcacgatcttggctcactgcaacccccgccttctggtttcaagcgattctcctgcctcagcctcccaagtacctggggttacaggtgcccgccaccacacctggctaaattttgtatttttagtagagacagggtttcaccatgttggccaggctggtctcgaactccagaccttgtgatccgcccaccttggcctcccaaagtgctgggattacaggcgtgagccactgggctcggctgcttgtagcatttaatggtgcaaaatggattcatgtgttgtctataaattcttaccaataatgggagttgatggagagaactattacctgaaaatacttcacgattctttggcctttcatttttttgttaaatggagtgagcttgtgtgcaaaatcaacctgatactaaaggataagaaaggtactcccgattgcatttcttttgtgtgtgtgtgtgtgtgtgtgtgtgtgtgtgtgtgtgtgtgagacagagtctcactgtgtcgcccaggctagagtgcagtggcatgatctcacctcactgcaacctccacctcccaggttcaagcaattctcctgcctcagcctcctgagtagctgggattacagtcatgcaccactgtgcccagctcatttttgtatttttgtgtttttaggtttcaccatgttggccaggctggtcttgaactcctaacctcaagtgatctgcctggcttggcctcccaaagttctgggattacaggtgtgagctaccacgcctgtccccagtttgcgtttctgttctttctggtgaccatagtgagctcgattataatagccatttattatatttgtctatggggaaaaattccctcagaataaatacacttctcctacgtgaacagtaacattttctttcttttttttttgagatgagtcttgctctgtcacccaggctggagtgcagtggcatgatctcggctcactgcagcctccaccttccgggttcaagcgattctcctgcctcagcctctgagtagctgggactacaggtgcccgctaccacacctggctaattttttgtatttttagtagagacggggtttcaccatgttagccaggatgttctcgatctcctgaccttgtgatccatccgcctcggcctcccaaagtgttgggattacaggcgcgagccactgtgcccggccaacagtaaccttttcttaaggtcccgtggttgatgtcttcactcattctttcttcttttaatatagtagaattgcgtatttgggggaggaatagagtttctgaaagagtgaatgtacaaagaagatcccagtgacctgttagaatgatgaatctcttttctctgtgttagcaagcctttaattagtaaggctgtttgcagtgtaattagaactgcacaagcatggaaggtcagtaatactgttcagaatttcataatgtactgtgtaacataacatactgtgaaatgaatccatagtaccacaaaatttgtttttaaagaagtttgtctctattgactcatctaggaggggtcacttaaaaacaaaatagggcaaaaaagtcaaattcagatgtcttaggttttctcaaattcctttaatctcgatatagcaaaagaaactgtttccttcttagccctagaatggcagtctgaaaaattatctaagtttttgaggaaacaaattgaaatacaagaaaattatttcctttacaaataaacagttctcttgtttgtctttgaacttaaccacatagagatttaaatagtttgttgttttataggcttgactgaggaagtcttctcctaaaatagaattttttaaaatagttttttctcagcccagctgagaccttagttatcatttttagttcttagttttgttgaagattgaagccattaagccgtagaagtgatgcagatttatgctgttgtctatatctgttctcacctactcaggatgaattgattataaaacattttatcataggatagcatgttgatgcatataaaacatagtgatgaaattctactttgtcttgttttacttattgcttgttcatccaaatgtattaaatttgattgtttaggtttgagatattataataaaacttggttacattattaaattcagtacatagtataaaatgtttattaaaaatagtattttaggctgggtatgttggctcatgcctgtaatcccagcactttgggaggctgaggcaggcagatcacttgaggtcaggagttcgagaccagcctggccaacatgttgaaaccctgtctctactaaaaatacaaaaattagctgggcatggtggtgggcgcctgtaatcccagctacttgggaggctgaggcaggataattgcttgaacctgggaggcagaggttgcagtgagcccagattgctccactgcaccacagcctgggcgacagagtgagactccatcttaaaaaaggaaaaatttgtcctttttttttgggaggggagtgtaggttcttctctacataatacattgacttccttaggggtattcatctctgtgtttgcatatcctaagggtgttctttagagaaatatatacatttctagacttatactcgtagattcttatctttgcctagtttcctctggaggacaagaatctcttctttagcactatttcccccatatttgtgtagcattcctacatttttcaaatgtaaaaaaacaccacatcagagacctttgacctcagttctctgtgaagtttcaataaactcgattcctgagaagacgtgttagtttcttgtagatatcaagtcaaactcaaagatctttaagtgttttctttgtttcccaagatgttgattctttactctcataaaacaggttaaagcaggctctctcagcctttctctttgagaaactactttcatatttccgaagactgcttgggaatgctggtgggagttgggataggagcagcggagggaggagatgcctaagagtgcctgttctcaggtagagttggaaatgttccctcctagagctgagatttcctgcaagacatcgagttggggtgtgaaagcagcagatttcagtatcagccagatgtggctttgaaatggtggttcacagtttcttgtgatttttgaaaactctgaacatattttagactttttagattattagtgcttgatgaggtacttaaaatcagagtctaatatttgggttgtacagttgagggtattaaagcccagagaggctaggtggtatcagtaaggtaacacagtaagttacagctactaagtatccaaggtgagatttgatcctgagtcttataacttaccgttgctctaggctctggaataagaaatgaagcatcaatttcctggggagcttttttttttaattaaatttaattttttttaagataagaataacatatttgaagaaaatgtcaagtactttcacttacattttcttattgatctccacaagaagacaaccaggcaatctgtctttagctgaggaaacagacccccgagaggttaagagtccctaagtagtaaacattcatctcacgttcaggacctctgactcatgtgtcttgctgtttatattatgtatgaagatagaaattgagaagctgtcagtaaattctgtatgtgctagataagcaccctgtttaaagaaattctgtggcaattgtcaattgtgttttataatcttgtctagacttgtgtctctcaagttttcttattcacacatatgtagttttatcccccccaaaataattattctcttgtgggatctacttagtggtatggtttgcaaatggattaactcattgaactggaatttttagtagattatattttcttttttctcatgtttctttgagacagagttgctctgttgcccaggctggagtgcagtggcctcctgggtacacttccacttcctgggttcaagtgattctcctgactcagcctcccaagtagctaggattaagggcatgcgccaccacacccagtgaatttttgtatttttagtagagacggggtttcactgtgttggcctggctggtcttgaagttccaaccttaggtgatctgcccgcctcggcctcccaaattgctgggattacaggcgtgagccaccatgcccggccagtagattgtattttctaatcaaaactttagacaaaccaattttgcttgtgtttaattaaaatgttctagttaagaacaatttattagtactattttttgagatggggtcttacttggttgcagaggctgtagtgcagttgaacaatcttagctcactgtaacattcacctccgggctcaagccatcctcccaccgcagcctcccaagtagctgggaccacaggcttgtgccaccacgcccaactaattttggtattttttgtagagatgaggttttgccatgtcacccaggctggtctgaaactcctggcctcaagtgttctgcccacgttggctactcaggaggctgaggtaggagaatcgcttgaacttggaaggtggaagttgcaataagccaagattgcgccactgcactccagcctgggtgacaaagtgagactccgtctcaaaaaaaaaaaaaaagaaaaaaaaaaaagaaatggttaaaataggaaaagtctcagttcctcttagctatttctgattgctacatgacttccatgaagctttttaagctttcactcagttctgaggtgtttatatgagcttgtgaggaacttctggttacaaactgtaatacctattggcttttagcatggtgcaaggaaaagagctttggattagggataaggacacctgagtcctattaaggtctctgtctggatttgtgaatgcacctgttaagtgagttgtatagactaaaatgttttccagactacatgagcctttttgagtattgcacaagtggtattttataaacgagaaatagaataaaaaatattgtgcattgagtacctaagaggtaagtattgctctgtgaatcattgtttcagttatatgtatagggtactgggttacaatgtaaaaaatgtatttttaattaaaaaaatataaatgtagaaaaatataatagagatgaggtctcactatgttgcccaggctggtcttgaactcctaagctcaagtgatcctcccgcctcagcctcccaaaatgttaggattacaggcgtgagccactgtgtctggccaaaaaatgtatttttcacacagtttggttttctattccaaaatttggtggcttaaaataactactttattagatgtcatgatttttggattaggaattcagacacagcttggcctgttgattctgttctatatggtgaataagatcacttggaggtgtttagctgacaacaggtctggtctggagggtccatcttatctttattcactcaccttatgccttagggtaactggaggcttggctcaactgggcttctcttagtgtagtttgagatcctctctgtggtttcttcagctgggtagttggacttctcacgtggcagctccaagagaccaaagcaggagctggcagccctctcaaaggctagcttagaatctggcatagcatcaccttcactatacactattggtcagaggagttccaggctagcccagatttaagagaagggaacatagacttcttgtctctaagatattgttcccattttaagtctgccacaattatgtaaaataatttagaaaaacatgactgaattatatatccaagcttttaattctgttattgccctttgaaggatgatcacttttaaagtgttttttcctccattgggaaatttgtctgcttttggtaaattttcatagttcaatttgagtatgtatattatttttccatggaatactgagggttttatgcttttgaagaaatgatttaaagtttaaaatttctttctctacattgatctgctggttttaattctttgaatagcacttatgatcatttgatgctgttcttttttgttacttgattattcatctttctctccttagaatgtaagttctaaaagggcagcacatgttcttgatctttgccaaatctgtagtgtctcctgtagtagaacagatgctcgataaatatttgttgagttaatgaatgaacaatttaaaagattgtgagctgggcgcggtggcttacgcctgtaatcccagcactttgggaggccgaggcgggcagatcatgaggtcaggagatcgagaccatcctgtctaacacagtgaaaccccatctctactaaaaatactaaaaaattagcggggcatggtggcatgcgctgtagttccagctacttgggagcctgaggcaggagaatggcatgaacccgggaggcggagcttgcagtgagccgagatcgcgccactgcactccagcctgggcgacagagcgagactgtctcaaaaaaaaaaaaaaagaaagaaagaaaaaaaagattgtgaagtatcatagatcagatctacgttgaaatgataaaaataaggaaaatctttttttagacggagtctctctgtgtcgcccaggctgtagtgcagtggcatgacctcggcccactgcaacctccacctcccgggttcaagcgattctcctgcctcagcctcctgaatagctggaattacaggcatgtgccaccacacccggctaatttgtgtatttttagtagtgatggggtttctccacgttggtcaggctggtctcaaactcctgacctcgtgatcctcccgccttgtccttccaaactgctgtgattacagacgtgagccaccgtgccttgccaaaataaggaaaatcttttagatagaaaatataggaccggtgtggtggctcatgcctgtaatcccagcactttgggaggctgaggcaggtggatcccttgagctcaggagtttgataccagcctgggcaacatcgtgagaccacatctctaccaaaaaattagctgggcatggtggcgtgcatatgtggtcccagccgctcaggaagctggggtgggaggattgctcgagcctgggaggcggaagttgcagtgaaccaagattgtgccagtacacttcagcctgcgtgacagtgggaccctgtcttaaaaaaaaaggaaaaagaaaatatatttcataaggttagcaacaagcttttgagaagggctattctttatttctgtgatgtactttctatatttttgtattaaaatcccttttctgttgtgaaatgatagtgatattcacttctatagtttaaaaatatgttctgtgcagcataaataattgataagcagtgttatcttgtactttcagattggagttgcctttgagagtcaaagatttgtagctcacagaaaataaagaagtactgtgtgggtgtgcctgggagggagttttgctaagaattcttactaaataaagttcaatcagtcaaatgttattgtactcttcaaattctccagggaaataaattgccagcttccatttaaagattgtattttgtttgaatatgtgatgttaaagtgaaatgtgacatataagaatctaaagatgattattaaaagcaaacaacataatagcattcttacaatgtcttttgcaggagagaattaatagatttagcagtgtttctttgaataaacttgtccataatgaaagctaactaaaattgcattaaaatttatcaactcctttaaaaaaattcaatatgttttgagatacaagtatgcacaagtattttctttcattgtctaataagaacttaaaggaacctgagatgtcacctataacaaactcctttgtgtttcagaaaaggaaactgatggtcaaagaggtaatgatttgtcaaaagtaataaagttattggtaagtccaggattcgaatcccttctcattcccaggcccctgacctttacatggctgcacactattttagggagacaagttttaagaagtttctctttttggatatgatatagattctttaaataatattattttactgatttttgaattcatattaaatgagggtttgtatttttaagtaacatgcagggaaaacattccacattcatgttatgacagctgggctcgtcaaggctttgcaaagctctaaaagtaggatacacacttttaacttttgtcaagttgtgatttaaaattaatcaaaaaaatcatgaggacaccttatttttgttattcctgtcttaaagaatctttatacatgaaaaaatgaaacatttataaaattagcccaatttgtctaaaaataagggtagttttgacggttgtgaatttctttttttaaaaaaactcaggaacaaggttatgattttaaaaatgcaagttttcaaaaagggcaggagtaagttttgtatttttaagccatttaaaaaagatagtaaggccgggcacggtggctcacgcctgtaatcctagcactttgggaggccgaggcaggcggatcacgaggtcaggagatcgagaccatcctggctaacacggtgaaaccctgtctctactaaaaatacaaaaaaaatttgccgggcgtggtggcgggcacctgtagtcccagctactcgggaggctgaggcaggagaatggcgtgaatctgggaggctgagcctgcagtgagccgagatcgcgccactgcactccagcctgggcgacagagcaagactccatctcaaaaaaaaaaaaaaaagaaaaaagatagttgatatttaataataattataaaaattataactataaaaccagtattagaaaattaatgatggatgaatgtaaataaagtaaaattatgcataatcctactttccagagataactaataacatttaggtgtatttctttccaatcatttttttctatgcatatatggtgtgtatttttttaaacacagtcaagttcatactctacttccttttgttttgcttttttcatttaacattatatcatgagcattttcttatgtccctaaaaagtctgtggaaacattttataatagttccataacattctgtaattatttaactattaccctatttctggttatttgggatataataaatttttgctattgttaataaggctgaaatgaataactgggtatacaaatctttatacacatttgtctctcttttaatgatagttgcctaaaagttggaattactgacacatattgccaaaattctttatagtagaaatgtactaatttatactcccattaattttatatgagagtgcttgttttatcgcacccttaacaaactggttgtgtttgaagagaactttgctattattttggggcttgaagcatttgttgaagagattagtggatgggtccacatttttggtatgctatttggaggcacttagctattttgggttatgtatctgattgcttttatagggccagaccacaagattagataaagtatatggaatatttacatatcagtcttacgaagagcaaactattcagacccacttatcttgattcagctattctaattgtaaaaagactactgaaggttaaaaatttcagttgactattttctcctaaagtaggataagctaggcttttaggaaaaaaatagggttgaaataaattgtttagaaaattgatcaaaagtagtagttactcagtactctctctctcagcgctcactctctttctgtctctctctgtctctctgtgtgtgtgtgtgtgtgtgtgtgtgtgtgtgtatttagaaaaagagtagaatggaaagattagaaatagagcatgaaaggctggggaagggaagttgctgtgaataacagaacttctgcctttacctgggaaaatatatctttacttttgtcgctacattattgactctgaaagatcacatgagtcctctttcttgaaataatatttttgtgtttgtaactgctgacacgactggtacttaaattttgagagaataaactttttgaaaatttttttgaccattaataaaaaacttttttttcatttcctacagtacatggattttctttttttttttttttttttaagacagggtcttgttctatctctcaggctagattgcagcggcgcaaacacagcttgctgtagccttgaactcttgggctcaagccatccttccatctgagcctcccaggtagctcggactacaggtgtgtggtctccctatgttgcccaagctggttttgaacccctaggctcaagtggtcttcctgccttggtctccctcagtgctgggattacaggtgtgagccattgcacctggctagacagctgattggctgggcgcggtggctcacctgtaatcccagcattttgggaggccgaggtgggcggatcacctgaggttgggagtttgagaccagcctgaccaacatggagaaaccccatctcttattaaaaatacaaaatcagccgggtatggtggcacatgcctataatcccagctgctagggaggttgaggcaggagaattacttgaacctgggaggcagaggttgcagtgagccgagatcgcgccattgcaccccagcctgggcaacaagagtgaaactccatctcaaaaaaaaaaaaaaaaaaaaagcggatcacgaggtcaggatatcaagaccatcctggccaacatggtgaaaccccatctctactaaaatacaaaaaatttgccaggcctggtggcgcacgcctaggggattgcttgaacccgggaggcagaggttgcagtgagccaagagtgcaccactgccctccagcttggtgacagagtgggactccatgtcaaaaaaaaaaaaaaaacggttagatgcaaatatcaaaaatgagttaaaaaatatctttggtgtggcttcaattttattaactattttaatattgcagacccatatcttcccttaattatactgaatttagtatatttgttaaaaaataaagttttaagactacctgttttggtatcaaaattagttttttttttttctttttttttgagatggagtcttgctctgtcacctaggctggagtgcagtggcatgatctctgctcactgcaagctccaccttgggttcacaccattctcctgcctcagcctcccaagtggctgggactacaggcacccgccaccacgcccggctaattttttttttaatttttagtagagatggggtttcactgtgttagccaggatggtctcgatctcctgacctcgtgatccacccgccttggcctcccaaagtgctgggattacaggtgtgagccactgcgcccggctaggttttttcaaattgaaaattttttttctttttctttctttttttttttcttttgagatggagtcttgctcttgttgcccaggctggagtgcagtggagcaatctcagctcactgcaacctctgcctcccaggttcaagtgattctcctgcctcagcctcccaagtagctgggactataggtgtgtgccaccgcgcccaactaattcttgtatttttagtaaagatggggtttcaccatattggccaggctggtctcgaactcctgaccttgtggtcctcctgcctcagcctcccaaagtgctgggattacaggcgtgagccactgtgcctggctttaatttgaaaattttaatgttacaaatcaaaggtaggtgttaccaaagtatgttaagcatgagcaaaagtgcatttgattgttcagagggccaagttcatgttagctttgggatcatgcctccagagatgtaagtttaactattatgataataacaaagtaataattatgccatgtgccaaggattctattagactctttactatagttaattaaattttaatcttcacagtgccctgaacagcatataatgggtaaaccgagggacagacagtttaagaaccagtttaaaggctgggtgtggtggctcatgcctgtattcccagcattttgggaggctgaggtgggcggatcacttgaggtcaggagttcaagcccagcctggccaacacggtgaaaccttgtctctactaaaaacacgaaaaaaaaattagctaggcatggtggtgcgtgcctttagtcccagctactcgggaggctgaggtgggagaattgcttgaaccccggggatgggggcggaggttgcagtgaaccgagatcatgctactgcactccagcctgggtgatagactgagactccatctcaaaaaaaaaaaaaaaaaaaaaaaaagaaccagcttaaagtcatacaggtaataggaagtcaagcagaagttgcaaaccagataccttttgctacctttacaggcttgctactcagcctggcccacagaccagaagcaattagtgagacctgggaacataaagaaatgcaaaattttggtcactgatacctgcagtgccaaacctgcattttaacaagatccacgagatttgtatgcatgttaaagtttgaaaagcactgatggtgtgaaatgtggattatctatcaacattttccacaagagaaggtgggtaactctagccagtgtctccaccactgtgaattgctaatccagctgctgctttgcttcagatcctgtttaatccagaggaacaattgactaattctgcttgtggaccttcggtcaaagtcttaaccacgccaagtatagctcagtgttttaacagcttttactcatggactgaacacatcagttttatagaccatggcttcattctggataggcatttcccaggttaaagagaacagtgctaaaaatagcattttctaaagaaacttgaaatcttctggaatatttgatgtgttttatggctagcaagaaaacagatttgtataaactggcttccttactaatttcattttgtgaacttaattattctatcacagggacagtgataggtaaagctaacttagactagagcagcactgttctgtagaaatataatgcaagattcctgtaattttaaattttctagtagccacattaaaaaaggtaaaaaagaggccaggagtgttggctcacgcctggaaggctgaggcgggcagatcgcttgaggccaggagtttgagaccagcctggccaacatggtgaaactccgtttctaccaaaaatacaaaaaaatttagccaggtacggtggcgcatgcctgtagtcccagctactcgggagcctgaggcacaagaatcgcttgaacccaggaggcagaggttggagatcgcaccactgcactccaacctgggcgacagaacaagactccagctcaaaaaaaaaaaaaaagtgaaatgtagtccaactaaaacaatacaattgtgtttagtggaaaaatatattgcttcagttataaaatttaaatgaattaaaattaaataaattaaaaattaagttcttcagtcccatcagccacatttcaatatcggatggtattggttgcttctgatataactgatttcagacatatgaaattgatcaccatcctagatggtcagtaagttaatgccacaggatattgtagtctattaataacattgtagaacagggcccagtcgttcacacctatattcccagtgctttgggaggccaaggtgggagggttgcttgaggctaggagttcaagaccagcctgggcaacatagtgagaccctgtctctacaaaaataaaaaaatgaaaattaaaaaaattattgcacagagaataaaggaataaaagcaatttggatcataaagcatttactgattccccccttttcatagttggagttaattttccttttattggttcacaatttcttaactcttcaactgcattaaactgtaagattagagccaggagttagggtgccatccacttttcccctctatggtcttagattcttttttttttatagcccgcatgcttctttggaaagtgaggtaattgtgtcaaataggatagccttgagtggggcccagaggttgtaaaattttatgtctgtacctgattcacctggtaacttgctaaaaataccgatgtccaggcctacctttctagattcggatacataaagtgacactttccatattaaataagctgctctaagtgtttctgaagttcaggaacgtttgggaccatcagatccagcaattgactctcaaaggctgcggactggaattagtacgtcgtgctgccgttgccaggcattttatattttcctaggctgaggcttcccaggctgttgctttttttccccccacctttgcagatggattttgcaggctgttaaatcccactcccgaagacctgccctgacagcgcctctttcctaagtgctgttacagggagctgagcttgccgaggtagacagtggccacgtgactgctaaaccggttgccagaggcgcggccatttttggggcgggcacccaatctctcgccctgtaaactgcggggtgacgggacgctgttactaggactcaagatggccaccgcgcccgctagtcatctcgctagcccgcgcgccagtgagctggcacgagacacgcggtggcccacggcgtctggggacgatctccagcccttcgcacggggcggagcgcccgccttccctccaatcagcacgccgggccggctagccaggggccgcccgcgcgcggggtgtgtgaggacgcgctcccagtcgctgagtgcctgagccgggaagcagttgctgtggtacctgctgctgcccgagcggacgtagagcatcggacgcgggcgccgtggcgctgggcaggagggcgaagccatgacgtcagtcaggtaacgagcgggcggctgccttgactgctccgagctgggcgttagcctcccgagcgcgtgagcactgtcgctccttctcgcgggtggtctggagcctgcctccgcctctggtccccctcgtgttgggggttccctccgcacttttcatttgggcatttctgctttcctcagaagttttcgggtctgtggcacattgcggagttctgtgtgtcgctgcttggtcgaggtgaccctcgcccaaattccagggttgcaagcgttcttgggtgtgtagtggatttcccatgaaaaatgtgccccacccgcgcccccgggggcggcccagggccggagggagcgtggcgtgcacagtgtgtgtcatgcctgcgtgtcatgccctctgacagaacttcattgttggccgggagcagacctgcaaagttggcccttctctgatgcaggtatattgccctcaagttgtgaaattgtgtgtctctaaaatgtttgctcatgactggaattaggaccctggttcccgaaggtaccatcttgtttctttactccttttatctcagagtcacaagtgaaatgagttgagagatactgggcatgtagcgaaatccatgaaactggagactttcccccaattgctcttccagtttggaaggttctttttttgttaatgaggacaggataatgggcttgtccactttctcccagtagccttgactgaatgtttaatttacgctagttcaactatttataaaaagagataaattgccttatatacccagtgttctgactggcctttttaaaagcagaacttgggctttgttgtcccagagaaagggaggccccagcacaaaaatgtgaagagaaataaaataagctcatttttggtctatgagctttccaggctccacccgtcctggtgatttgagggcttctcaatgccaatttttactacattgtgtttaagagacagcttgggaacctaaccctcagtaagatctaactgtgctgaactcggacatagtctgtctcttaaattgcataattatatatatatatatatatatatttttttttttttgagacagagtttcgctcttgttgcccaggctggagtgcaatggcgcgctctctgctcactgcaatctccgcctcccgggttcaaacgattctcctgcctcagccatccaagtagctggaattataggcgccagccaccacacccagctaattttgtagttttagtagagatgggggtttcaccatattggccaggctggtctcgaactcctgacctcaagtgatccacctgccttagcctcccaaagtgttgggattacaggagtgagccaccgctactggtctaaattgcttcattctgtactaacatagacaaagtacttatctcattatgcagaaggagattcaggtgctgaaacatggagacccacatggaaggatttcacagtaaattatattggggcatataaatctagcttttaaagctaacagtattttaggatgaattagaattaggctattatacccagagttaattccccttcttcccattcccactcttattatcacagaatgctactaattaggtgtaggggtcaaatactttctgtgttaagaatcagttgttatgtggattcagttttaattgactatcatcttcctgaccgtgcctcattggagaaacatccaaatctaaagcttctgctgtttaataagtgacagcaggatgtatcttttactgtaggggttgatagttttttttaaaagactgatgtaaaggttgacaccagccttacttgacatgttttgaaaggatggataactgataataaaatttatttatgcttgtttcttcagatgtcagtctgtattttacataatcttgaactatggtaacatggctcgagaaagctcttttagatgttatttaaaccagctattacattttacacctgaggaaactgagacaaaagttgagtgccttgtgcaaaatcagcggcaaaattaggaattgaatccagatttccatgatttagtgctctgcatggtgcctttgtagaaacaatatactatttaaacttcctgaaaaagctgtttctgtggacagaaattgtaaagtatcatgagagacaactatagtaactcttttgctttcttcttatcctgcaacgaacttgataactggggtttagaagtaggcagggttagccaagagaacacaactactgggtgttgggaagtgcagggaggccattgaaagtgaagtgactctgtatggtgatagttttgaatgagttggtcatcctacagataccagccatttcctggtgaacactacatttaatacaattatgtcatatctttagtttttgcaataatgatgtcagacatgttcctatcagaggcatttgagccagagcgactccatcttgaatagggtctgggtaaaataaggctgagacctaccagggtgcattcctaggaggttaggcattcttagtcacaggatgagataggagatagtcagaagatacaggtcacaaagaccctacaacaggatgcagtaaagaagccagcaaaaactcaccaaaaccaagatggtgatgagagtgacttctggtcatcctcactgcttattatacactaattataatgtattagcatgctaaaatacactcccaccagtgccattgacagtttacaaatgccatggcaacgttcagaccttaccctatatagtctaaaaaggtgagagaccttcagttctgagatatcagaactgatttcttcctttcctggaaaactcatgattaatccaccccttgtttagcatacaatcaagaaataacaagatacttagttgagcagcccatacccgtgctctgtctttggaatcgtcatccttttgtttctttatttctctaataaacttgctttcactttatggacttgccttgaattctttcttgcatgatgtctaagaaccctcttggggtctagatcgggacccctttctgttaacattcccattttgtgctcagtctaacagtagcctaaaaggtaggtattattgacccccttttactgataagctgaatgattacaagatatccaactctgactttgtgtccaatgttcttgttttataccacccttaattgttgctaaatatagtagtatgtgactcttttcatagcaatggctatgaaagaatacaggattggaaatcaatgaggaccaatggtcagaatatcttgggccccactgagggccttttctgagttactgagcttccatttctcttttctttttattattattattattattattattgttattattaattattattttgagacagtgtcttgctctgtcgcccaggctggagtgcagtggcgcgatctcggctcattgcaacctccacctcctgggttgaagccattctcctgcctcagcctcccgagtagctgggtttacagacgcctgcctcacgcccagctaatttttttctatttttggtagagacggagtttcatcatgttggccaggctagtctttttttttttttttttttttgagacggagtctcgctctgtcacccaggctggagtgcagtggtgcgatccggctcacttgaagctccgcctcctgggttcatgccattctcctgcctcagcctctctagtagctgggactacaggcgcccgccaccacgcccagctaattttttgtatttttagtagagacggggtttcaccgtgttagccaggatggtctcgatctcctgacctcatgatctgcccgcctcagcctcccaaagtactgggattacaggcgtgagcaaccgtgcccggctggccatgctagtcttgaattcctgacgtcgtgatccccccacttcggcctcccaaagtgctgggattacaggcgtgagccaccgcccccagccccatttctcttttctattctggacatttgtttaatgaaataactcagtagcagagatactaatatgcatcctaccagtgttgttggataagtgtaaaagtgcttttaaattttaaagcattttaaaaatagaataaaagcactttgagccctctagagaatggtgtcatctgaggaaaaaaatgtttaaatcttaaatttttagacaggaaacaaatttacctatctaattttctcattttacagttgaattaaagcccagagatagtgtgacatgttcaagttcacacagttacatatcttgaactagatatgagatctctagataccttgttcagttccctttctagtatagcattcaactctgaggaattcctaaataatgatttttttttggggggggtctctttaggaattcctaaataataattttaaatgaaaacttttctttttttttaacttaagatctttgaatttggctggagttagtatttcatcatttgtattctattctacttaattactgattaagagtctaaatttacagcctctgaaaccagatatccttggggaacaacttatatcctttgttatgtatatcagattcctactggtcttcatttgggaaatgatagaacatatttgataaattgatgcttttgtcattttaaattggcccaatagttaagttggcgcctgagttaagttcaggagacagaggaagatgcagaatgtcaggattcaaagaggatcttagcattttactttttttccttttctatactggatcttgtgtccaaagtaaagtgaaatgtcctacttagacctagtggtagagcctaagatagaatttagaccttctgactcctaatttatgtatttttcactgagcaacactatttcaaaattcccctctgaatattgccttgttttcctaacatcagtgtctagtctggttttgggcatcgcttacagcttgggtttgcgccagggaagactaggaaatggagttggggaatatttgttgtagagctaatgagccctattctttggtctgcccagataggtcaggtttggtctaaaactattctgggactctggacatcactgtgccctacatgatgattctggaacccacttttgtgggttaagcctacattggaaaatttatgtgggcagtgggtggggtcgtggggtattttccttctaacactcgaaactttttgaggtatgtccaatagaatctgccaagccactcagaacattcatatggagactaaaatctggctaagattgaaactgtctttgttgagttggtttctttagagccttaaagttttcaaactcatttttacctgtgtttttaaaatacgaattgtaaattcacattactgcacaattttttttatgctgtgggatgtttttagagaggtaagtgagcttttaaactaaaattgtttcatttatggaatattttgaagaagtaaaacagaaatctttttatttatttatttatttatttatttatttatttttgagacacagttatactcttattgcccaggctggagtgcaatggcacaatatctgctcactgcaacctccgcctcccgggttcaagcaattatcctctctcagcctcctgagtagctggaattacaggcacatgccaccatgcccggctaatttttgtatttttagtagagatggggtttcatcgtattggtcaggctggcctcgaacttctgacctcaggtgattctcctgccttggcctcccaaagtgctcacaggcatgagctaccgtgccggccaggaatcttttatgtgcaacgttgtcagctgttaatgctcctatttatgaataggtcacctttgtttgaaaaaagcgtacaaggttttctaactccaaatctttccagccacaatattgctacgttaagcagaactgtcaaagataaaacttgaaccaaagtgattttctagactgtttgaatgttaaccctttcctgcaatattggttaacagtcacgtctccctacctcttcatacctccttggttttattttattatttttattttttgaggcacggtcttgccctgttgcccttgctggagtgtggtggcatgaacacagttcactgcaacgtcaacctctgggcttaagtgatcctaccacctcagcctcctgagcagctgggagtagtcccacttgtagtccctacagtcccacctgtagtcctgtagtcccacctttgtattttttgtagagatggggtttaaccatattgtccaggctggctttgaactcctgagctcaagtgatccacctgctttgacctcacaaagtgctgggcctcccaaaatgctgggattacaggcatgagccgctgtgcccagccacatccttggttttaaattgttatttaaaaaatactgttgctgggcacggtggcacatgcctataatctcagcactccgggaggccgaggtgggaggatcactttgaggccaggagttcaaggccagcctgggcaatatgataaaaccccgtctctacaaaaaatacgaaaatttgcagggtatgatggtattgtgcctgtagtcccagctacttcagaagctgagtcaggaggatcccttgatcctgtaatgaaatatactatttttttttttttgagatggagttttgctcttgctgcccaggctggagtgcagtggcgccatcttggctcaccgcaacctccacttcccaggttcaagcaattcacctgacacagcctccctagtagctgggattacaagcgtgtgccaccacacctggctgattttgcatttttagtagagatggggtttctccatgttggtcaggctggtctcgaacccagcctcagcttacccacccacctcggcctcccaaagtgctgggattataggcacaagccaccacgcctggccatgaaatatactactaataaaataaaatactgtgataaaacataaataaacatttttattttttactttttacttttttagctggcattctggtctgagattattttattttatttttattttattcgagacagagtctcgctctgtcacccaggctggagtgcagtggcacaatctcagctcaccgcaacctccgcctcccggattcaagcaattctccctgcctcagcctcccgagtagctgggattacaggtgcccaccaccacgccctgccaatttttgtatttttagtagagacggggtttcacaatgttggcaaggctggtcttgaactcctgacctcaggtgatccacccaccttggcctcccaaaatgctgggactacaggtgtgagccactgtgcccggcagagatttttattttttaaatggcaaagctaggttatgaacaggatgaccatatgttccagtttgcccaggacaattctggatcatgcctgttatcctgacattattatttattattattttttcttttgtagacacagggtcttgctctgctgcccagctggagtgcagtagtgcaatcatggctcactgtaaccttgaaatcctgggctcaagtgatcctcccacctcagccctccagagaggctgggactataaacacacaccaccatgcctggctatattttgtgtgtgtgtgtgtgtgtgtgtgtgtgtgtgtgtgtgtgtgtcaggggggtgggtaaagatggggtcttgccatgttgcccaggctggtcttgaacctcctggcctcaaactcttggtcaagtgatcctcccgcctcagccacctaaagtgctgggattataggcatgagccattgtccccggctatcctgacacaattattaatagacacataaatgtgtctcatttactctcaaaagtgtcccatttggataataaattatctggtcacctacatatgcattacaatcattttgttgtactaggttttgtttgttgaaatgttatttgaactaggaccataagataatggaattttggcctattttgggtacatttggatgtttttcattggtcagacatttttattgtatggagagttctgagtgtacaaatgtatattaaatagtaatgcacatgatttgaaattagggattatttgttatcttacttttgggaggttacataaccttgaggaacctcttgtttcctcatccgttaaaaagagataatagcgatacctatcctacatgggtgttttgaagatattaaagaggtgacataccaaaaaatgcattttaagttgaaaattgttatataagtgttagtcatgtcacacatgtgcctttctgcaattgaatttaaaatgaataattttacctagtttggggaacttactatttgatagagcactggtagtgttttgctgtaaaggagagcagggaaataatggtagttggaagtacatgctgggctaaggttttctgcggggaggttttgaaattttcacatttgtgtgctgaaaagagtggtccaatagaaagcagaaaaaatagatgatgcttgacagaaggaagaaatcaatgttgagtaggaaagaaggatagaatctagaatacatatggaaggattggctttacgtaaccaagaaacacatttccctagtctgttcactttaaaaaaaaatgccaacaatataatttttttttttttttgaagcagagtcgtcggccgggcgcggtggctcacgcctgtaatcccagcactttgggaggccgaggcgggtagatcacgaggtcaggagatcgagactatcctggctaacacagtgaaaccccgtctctactaaaaatacaaaaaaaaaattagccaggcgtggtagcgggcgcctgtagtcccagctactcgggaggctgaggcaggagaatgccgtgaacccgggaggcggagcttgcaagtgagccgagatcgtgccagtgcagtgcagcctgggcgacaaagcgagactccgtctcaaaaagaaaaaaaaaaaaaaaaaaaaaaagaaacagatcctccctctgttgcccaggctggagtgcagctgcccgatctcggctcactgcaacctacctctcctggggtcaagggattcttctgcctcagccccctgagtagctgggattacaggtgcgccccaccgtgccaggctaatttttgtatatttttgtagagatggagtttcaccatgtcggccaggctgctctggaactcctgacctcaagtgatctgcctacctcggcctcccaaagtgctgggattacaggcgttagccactgtgcctggctctctcagtataatttacctaaagtcaaatcagccttccctttccttcccttcccttcccttcccttcctttcccttcccctcctttcccttccccttccgcctttcccctttcccttctcccttctcccctttcccttctcctttcctttccacagggtcttactttgtcgcccgggcttgagtgcaatggggcaaacacgtctcactgcaaccttgacctccccagcccaagccatctacttgcctcagtcccccaagtagctggggctacaggtgtgcaccaccacgcctggctattttttttgtattttttgtaacaatgccgggggagtggggtgggggtggggtcttgctatgttgcccagggtggtcttgaactcctgagcccaagtgatccacccacctcggccttccaaagtgctgggattacaggtgtgagccactgtgcctgatccagcctctttttaattaattctgtcccccttctcacccaggcaaccacttttggacttcttttactatagatgttagttctgcctgttctagaacttcacataaatggaatcatacagcaaggagtattttgtgtctgattacttttgttcaatataatattttttagattcacccattttggtgtgtgtatcagtagtttttcccttttattgtgaagtaatattccattatatgtatgtagcaacaagtcttctattgatgggctttgggttatttccagtttttggttactatgagtaaagttgctatgaacatttttgtatatatctttatgtggacttgggtaaatatctaggagtgaaattgctgtgtactagggtagatttatgtttaactttagaaaccactaaacttttccaaaatggaaaatttaacactttttacattcccaccagttttttttttatgagagttcagttttccacattcttcacaatgtttggcattttaaaatttaggcattctcctgagtgtgtacttgtatttcatcatggtttttgtttatatttccttgatggctaatatgtgattattggccatttgcttatcttttattttgaagtgtcaattcatttctgaaatattatcactgaataatatttcattgtatagatatgccacaatttatccatttatcacttgatagatatttggattattttcacttttgggctattatgaacaatggtgctataaacatttatgtacaagtttttattaaacttttatgtgcaaccctattttattgggttgtctttttgttgctgatttgtaggagttctctttatatctgaatgcaggttatttgccaggtttctcagattttacacgcacatacacacacacacacactctttctctctctctctctaaatattttctcctggtctgagctatgttgttgcattttcttaatgccttttgagagcagaacttttaagttttgagcaagttgaatttgttgatttattttattttatggtattaccttttctgttctaagaagtctttccttactctctgctaggcttgtgaaactattctctcatggtttttttctagaagctttatgtttttgtcttttgtatttaggcctatgatctatcttaaactactcttttgctatcatgtaagggtttctcaaaaggattttcaattaattgattagatagctgtgggtcttttcttggatttgttctattctgttgatttatttgtatcttcttatgtcaatgccacactgtcttaattattgtagctttataagattggtattgttactttaaattttgatagaattaatcagtgcagccgtgtgggcctggagtgtttttgtgggaaaaagcagaaggttttaaattagtgtaattacttttacaggtttaattactttagctgatatataagcattcaggttcttcactttttcctgtggcagttttaagaagttgaatttttaaatgaatttattctcaattgttgagttgttataaagttcataaaatttcctaatattctgttattgcctgtatgaactgctgtatgtctccatttgcattcttgatgttggtacttcttttgaatttttggatcagttttgctaggggtttagcaattaatcttttcaaaaacccagattttgttttgttgaatttctattttggacatgtatttttaatttttttttttttttttttttttgagacggggtcttgctttgtcacccaggctggagtgcagtggcgcgatcttggctcactgcaagctccgcctcccgggttcacaccattctcctgcctcagcctcccgagtagcagggactaccggcacccgccaccacacccggctaattttttttgtgtgtttttagcagagacggggtttcaccgtgttagccaggatggtctccatctcctgacctcgtgacctgcctgcctcggcctctcaaagtgctggtattaggggcatgagccactgcgcccggccaccttgctctcctcttgtggatttgatttgctctcttttttctaccttttttgagttagaagtttagattattgtttttaaacctttcttgttttctaatgtgcatttcatttcattcattcattcatacattcattcagagacggagtcttgctctgttgcccaggctggagtgcagtggtacgatcttcgtttactgcaaccttcgcctcccaggttcaagcgattcttctgcctcaggctcccgagtagctgggactataggcgtgcaccaccacgccaggctgatttttgtatttttagtagagacggggttttaccatgttggccaggctggtctctaactcctgacctcgtgatccgcccaccttggccccccaaagtgccaccgctcccagccacatttctttcattattattattttttctttgctaacccctagtagtcattctaatgtacatttcttatataattaacattttcttctaagtactcctttagctgcagcatacaatttcgatgtgttcaattcaaatttctatttccattgtgatttttctggtccacaggtcatttagaagtttattgtttcttaatatttggggattttttagctattttcaattttacatggtgttcagggaatgcgttgttgacatattgtgtacatatctgtaccatatatctgtaaatgataagttgtttatcattttaatcctttgatagctactgagattagttttaaggcctaccctgtggtggtctgttttggtgaatgttacctgtgtctctaattccgctctgcaatattttgaggttttcagtgtagatattttatgtatcttttattaaatacggtgtatactgcagttattgaatttagtgttctataatttatcaattaggtcagatagttttatgtgtttgttactatataactgagatataattcagctactgtaaaatgcaccacttaaaaattgcacagctcagtagttttcagtatattcacaaggttgtacagccatcggcactatttaattccagaacgtttttgtcccccaaaatgaaaacccatacccgttagcagttactcttcatgtctccctaacctctaacccctggcaaccactaatctaccttgtccctacaaatttgcctattctgaacatttcctaagtggaatcatataatatttggccttttgtagctggcttttttttttaactaagtatgttttcaaagttcatacatgttgtagcgtgtatcagtatttcattctttcttatgactgaaataatatttcattgtatagatatgccccaatttatccatttatcacttgagagatatatgggttattttcacttttgggctgctatgaataatggtgctataaacattcatctacaagtttttgtggtgttctatttttctatttcccctaagggtagaattgctggggcatgtggtaattttatgtttactttttgagcaactgccaaactattttccaaagcggctgaatcactttataatttgcaacagcaatgtatgaagattccagtttctccacattcttgtcaatacttgttactgttctagtcttcgctgagaggctctgtgtgcttgttggagcacactttcagcactcaaccaggctttcagttcatccatagccttgacttcctgttttgccgagcttcatgctcagtcagtggtgattgcttagggccttctcaggtctttcttgagtatgcccataggcctgggcacactgttttcatcttccagggtcttaggaatttcagaacttttcaaaactccctatggacatctcattctcctacttttccttttgtgttttttggttagcttgtttgccccagctgcttcagggagctgaaatgttaagcaattgtagctgattgtttttgacaaataaataccttgggggaaaagcctgttagcaatgggcaagctctgaatcaggttaaatattaggaagtcttgggagtggggtttttcagggaattgctagtcagctcaaataataactgtactctgaaaatgggactttgaaggaactctagccctgttctgtcacctccactggctgctaggctccaggattccacagattgtggtttgctgcttttcagggctagcctggagctgggaagaggggcatgggaataaggcatgttaaaatgccacaaagcttgctattcttactgagatgcagccatctttttttgaataaatgctccttggattgttgcaaactttttggttaatattcagagttctgaaaaaggctatttttgactttttttttttttttttgagatgcagtcttgcattgtcgcccaggctgaagtgcaatggtgtaattttggctcactgcaacctctgcctcccaggttcaaacgattcccctgcttcagcctctggagtatctgggattataggcacctgccaccatgcccagctaatttttgtatttttagtagcgacggggtttcaccaggttggccaggctggtctcgaactcctgaccttgtgatctgcccgccttggccttccaaagtgctgggattacaggtgtgagccactatgcccggcccaagtcttgacatttttttgccagtgttcttgttggttttatggaagagaggatttttggaggtccttactctgccattcccaatgatgtcacccaatttgttttttaagcattaaaaaaaattattttaaaatataaagacagggtctcactatgtcaattaaaaagacagggtctcgcccaggctggtctcgaactcttgggctcaagtgattgtcctgccttggcctcccaaagtgctgagactacaggtgtgagccaccacacctggcctaaacatttttaatatatctgtttttatatcctgttcctcccttttcttttgaaatacaactcacagaaattgcaaaaatagtacagaaagttcctgtgcaccattcactcaacttcccccaatgatatatcttttataactatagtgtgttaccaaaaccaggaagctgatttcggtgttatacaatagtattaaattaactatagacgttattagaatttcacgggtttttgtatatactgtttttaattgaggaggtggtggtgtatagttctataaagttttatcatgtccagattcatgtagctattaccacattcagggtattaaactattctgttaccacaaagaaatttcttcatattatttctttatggttatgcttttctctgaaccctaacccctggcaactactgatctgatttccatcactgtaattttgtaacttcgagagtgttatataaatggaatcatatagtaggtaacccgtagatacggcttttttctcacttagcacaatgcctttgagatccgtttaagttgttgtgtgtgtcatagttcattcctttttattgtttctcttttatgggtgtaccatagtttgtttacctatttacttgttgaaggacatttattatgtttccagatttttaccatttttttttctttttctttcttttatttgttttttttgagacagagtcttgctctgtcacccaggctggagtgcagtgccgcgatcttggctcaccacaacctccgcctcccgggttcaagtgatttttctgcctcagcctcctgagtagctgggattacaggcgcacactaccacacccagctaatttttctgtttttagtagaagcaagttttcactatgttggtcaggctagtctcgaactcctgaccttgtgatccgcccgcctcggcctcccaaagtgctgggattacaggcgtgagccactgcacctggcccattttttttttttttcaaacagatatggttttgctctctctgtcactcaggccagagtgtattggcatgatcattgcacactacagtcctcctgggcttaaagaattctcccacctcagcttcctgaggaactaggagtagagacatgcacaactgcacccagctagtaattttaatttttgtagagatgaggtcttactatgttgcccaggctggtcttgagctctggcctcaagtgatcctcctacctcagcctcccaaagtgctgggattacaggtgtgagccaccatggctggcctagtgttttacaaataaatctgttaggaacatttgtgtacagatttctctgtgtacttaagtttttcttcctctgggataaatgctgtgtagtgtgattctttaatttttggtgtgtctgcctgttttactaattactgaaagaagggtgctaaactaagattatgtatttgcctatttcttttgtttctaagtttttaaaaaagtattttgaagccattttatttggtgtgtacatattttgtattgttacctttagcatttcttttcttgatgatttgacctattttcatgaaatccctttgtatctggtgatactctgtattttaaagcttaccttgtctgtgtcttaatatagccactgtatagtgtctatatagtgtcttaatatagccactgtaatttatgattagtgttttctttttttttcttttttttattatactttaagttttaaggtacatgtgcacaacatgcaggtttgttacatatgtatacatgtgccatgttggtgtgctgcacccattaactcgtcatttaacattaggtatatctcctaatgctatccctccctcctcccgcctccccccaccccagtgtgattagtgttttcatggtgtgtctttttgctaactttttattttcaaaacttctttgtctttataaaagtgtatcttgtgctaggcatgctggctcatgcctgtaatcctagaacctagggaggctgaggcagaagtatagcttgagcccaagagtttgagatgagcctgggcaacagagggagacccagtctctattaaaaagaaaaaaattaactgggtatggtggctatagtcccaacttattgggaggctgaggtgggagagcttgggaggttgagcctgcagtgagctgtgattgcaccactgccctccagcctgggcaacagaacaggagcctgtctcaaaaaaagaaagaaacaaaagatcagaacctataatcacagaatcactgaaaacccatggaattatcatatgctagccattgggaatacaaatgtaaatgagatttcaaaaaaatctttaccctttgttgtctaggtggttaagatcagttgattgagataaagttcaaagcaacccctaaaatcaactaaaaagttcatcaaaggacttttagaactgagcaggagggaatgaataaatctttgggagggagggatgcagtgccttgatatacagtaccaggagccattttctacattgttaacagcactcttgagtgatgttggtggcagcttgtatatcttatgtggaagcccttgggtaggagtcgatcaggaaaaacttcccaagacaggtagcatacagggaattttaaaaagatgaatgggagtttgccaggcaaaggaagcaggagaagaactttacaagcagagtcttattcaaagaacagtaaggcattatgattaaaatagtttgtatatattagaatggtgagaggtaaggttaaagaattactgaattttgattatcttagtgtgcacatttcttcccattttaacaactctgaaattggcatacatcttacaactgattgtgttttgcatcaccattggaaattgggattattttatgaataatggcatcttagatatgatgaaatatggtaagtttgagtagattcaatgtcctttaagttatgcttttggattttatcctattaataatcagaagctaggtagattttaagtagaaaaatattatgtctagaattgtttaaaataatatgattttggtgatattgtgcaggatttattgtggctaaaacaattgctaacaatgtagaaattcaggcaatgtctgcagagggcctagtgctagtgggtgtattgtgggaaatccaggtacaggaagcgtttgataaaaccaagatgatgtcgttactagtaagatggggctagttgacgtagagagaagagtcatataaagctgaggtttctggatttaaagagaagatgactggtgtaacagttaaaggcagtcattgttagtgtttattctggcatcataattaaatgtttctattactgagagggctaatcaacattcaaacattaatatatcaatagccaagaaaagattttctcaggaactcttactgtaaaatatatgtcagtataaaatttgttgactgtccaataaaataataattatagtgtaggtttatgttggctgcaagcctaaattatgagacatttataaaattactgaccgctcccccccccaaaaaaaaaagattgttcagaatctctcatcctagcatccattccaagaaaaagatattgctaacatttggaataaaaagtaatcccagtacgggttagtcatagtttttggctatagactaaacctcatcttgttcacattctagtagaacaagataaaaacaaatgcttattcatatagtatgttcatcatttaagaaggtcatagtatttactggcctggacactagtttatatgtgtttgtatttaagaaactagccattataatctcaattatgtgcagtgaaggagagagaaacgtgacatgagcaaagttttatttgcttttgaaaataattgtatcttttttacttaacttactatttcaagatatcttttatatgctactttatttaattaatttgtttttaagacagggtcttattctgtcacccagggctggagtgcaatggtgcaattacagcttactgcaacctcgaccttccaggcttaagcgatcctcccacctcagcctccctggtagctgggattatgggtgtgcaccaccatgcctggctcaattttttatatttttctttttctttctttctttctttctttctttttcttttctttcttttttttttttttttttttgaggtagtagcatactcatggctcactgtagcctcaacctcctgggctcaaggattcttccacctcagcttccctagtaactggggctataggcacatgccaccacacgcggctaatttttgtattttttgtagagatggagtctcgccatgttgcccaggctggtcttgaactcctgtgcagaggcaatgcgcccgcctcagcctcccaaagtgctgagattacaggtgtgagccactgtgcccagccaattttttgtagagatggagttttggcatgttgccctggctggccttgaactcctggactcaaaccatctacatgcctcagcctcccaaagtgctgggattacaggtgtgagccaccacgtccagcctgtgctaatttaaattattttctcctcactgctgtactagccacaacttctgcaaccagtttcatgtgggctttggacaattgcagcctaacagcatcactcatcagggtctatgttgcatacgttctcccttggggaactgtaatgttaagattaggctgggtgcggtggctcacacctgtaatcccagcactttgggaggccaaggagggcagatcacgaggtcaagagatggagaccatcctggccaacatggtaaaaccccatctctactaaaaatacagaaattagctgggcatagtggtgcgtgcctgtaatcccagctacttgggaggctgaggcaggagaatcgcttgaacctgggaggcggagtttgcagtgaaccgagattgcgctactgcattccagcctggtgacagagcgagattctgtctcaaaaaaaagaaaatgagcactaataatcttttctatattacagttttataataaaaatgcattacatattaaacagattcacaaagtgaactaatgacaatttacgtctgtccctatactttcagttgtaagtaactaaaaaccagcctcaaatggaaataaacaaaactaccgacatatgtaattgaaaagtccagatacctgggtgatgaaataacctgtacaacaaacccccatgacacaagtttacctatgtaacagacctgcacttgtacccctttacttaaaaaagcaaaacaaaacaacagaaaagttcagatggagtataggtttcaggtaaagctttattaggtggtccaacaacttcattaatgacctggtttctttcagttttcgcactctgctttctgtggtgttaaatttatcccaaggcagccacattgaagccattaggtttttaaggcttctagcaccttcttcatttatatctattagggaaaaatatgttctgtatctgagcatcatagaaaaaaatcttgggttcattctgattttcctggcttaggttacatgccagtctctgaactgattactaaggctagagaaatatattgtgctgattggcttaggtttgccccagggatcaattccacccaaattccattcttgagtgaggaaatttggggtaaaagagggaggatagcaaggaaaagatgacagacacacaattccagtttattataagaatgacttcaaatgaccttaactgaattgtaatattatttgggaacaagtcaaacattattaacatttaggcccagagatggtagatggcttgcttaagtctcccagcaagctacctcaagaactgagacttgggctgggcgtggtagctcacacctgtaatcccagcactttgggaggcccaaggcgggtggatcatttgaagccaggggttcgaaaccagcctggccaacatggtgaaaccccatttctactacaaatataaaaattagccaggcgtggtggtgggcacctgtaatcccagctactcagcaggctgaggaaggaattgcttgagcccatgaggcagaggttgcagtgagcagagatcatgccattgcactccagcctgggtgacagagagagactccgtctaaaaaaaaaaaaaagaaaaaaaaaaagaactgagactcagaagtgaattatttgactcttgaattgtacttcattcttagaatcaattattggcctctctgtaagactgtctttactgagtttttaaacggagtataataaactcttttgggaatgcggtagatgttcaaaggtttgacttcttaaaaagaggtgtaacaattatattccttaaaactgagaggggaccaattgagggtagagggattgatgtgggggcaggaggatacttttttgttgttattgtgatgaaaatgttccatagttttgtggttatatgactgtatacattgaactggatgcttacaaacggtgataaaaagggtgaaggaaaataaaaaaccaagtagcccaataacactgctcatccttgtttttttgttttgttttgttttttaaataacaagttctaggagtttttgtttgaataagaatatataaatcaggcagagtagtcccagtgaaatcatggttagattttactgtatttgtctgttgatccttcaccttctaagcacttaaaatacttttttattagacttgctttgatcacatatgcaatttaagtgtgaataagtaagtgtattatctttccctcctccactcagctttctttaaatagaaaagggacaaatatctctttattgcatattcagccatagttgctcaatctatggtgttaataagagactgtaattttatcttctaaaaatcattacagattataattataggctgtacctcattctcttaaagaaatattggcatgttagtccattgatattactgatagttgccaaatggtgagaatggtaactggtttggaggcaactgaaagggagggggaatcatcagtaaactggagaccaataaaaaattacacagaaacaaatctttttggataaactagatgaatgtctcttattgagactgatccaacagtattcactggcccatttcttgctgctagatgagcttctgtttaaggcatcacttgtggtggagttctttcttttatttggattggaaccatactgtgatctcttatggaaaacagacttcctccaagtctgttaaatataatttaaaattatatcgtttcttgttgatttgtttgtttttgttttgctttatttcatgttataggcatctgaaatgaatccttatatatataacatacaagtatatgtatgagaagacatgaatataagaagtataggaaacataagacatgaataaaagttttagctagacatttttagatgaaaagatgtgcatttaaatttgtaaaagttacaaatcgttctataaaaagttagcatatatttaaattttttggatacataataagagaattatatcacttctgatatccattgtgaagaccctaccacagtcatttttttgtgaagggtagatagggctcttgcttgtactcttccaggatgtgccacgggctccctaataacattcaggggagtgcatgtgcaggtttgttacatgggtatatcatatgatactgaagtttggttttgtaatgatccccatcgtctaagtagtgaacatagtaaccaataggtagtttttgagcccttgctttcctgtctccctccctgattttggaatctccagtgtcttttgtcccgacatctttgtgtctctgcgtacccagtgtttagcttccacttataagtgaaaacatgtgatatttggctttctgtttctatgttaattcacttaggataattcagctgcatccatattgctgtaaaggacatgatttcgttctttttttatggctgcatagtattccatggtgtatatgtattgaattttctttatccattctaccattgatgggcacctaagttgattccatgtctttgctattgtgaagagtgctgtaataaacatatccctttttggtagaatgattcattttttttcattttttttattttttaggcagagtctcgctctgtcgcccaggctggagcgcagtggcacgatctcgactcactgcaacctccacctcctgggttcaagtgattctcctgcatcagcctcctgagtagctgggactacaggtgctcgccactacacctggctaatttttgtattttttatacagatggggtttcaccttgttggtcaggatggtcttgatctgctgacctcatgatccacccacctcggcctcccaaagtgctgggattacaggtgtgaaccaccgtgcccagcctagaatgattcatttttctttgggtatatacccataatgagattgctgggtcggatggtaattatattttaagttttttgagagatctttaaacttcttttcacaggggctaacctaatttgcattcccatcagcagtttataagtattaccttttctctgcaaccttgacaccatctgtttttttttttttttttttttgactctttagtaatagttattctgggctgggcacagtggctcacacctgtaatcccagcattttgggaggctaaggcaggtggatgtgctgaggtcaggagttcgagaccagcctggccaacatggtgaaaccccatctctactaaaaatacaaaaattagccaggcatggtggcaggcacctttaatcccagctactcaggaggctgaggcaggagaatcacttgaacctgggaggtggaggttgcagtgagctgagattgcaccattgcactccggcctgggcgacaagagcgaaactccgtgtccaaaaaaaaaaaaaaaaaataggtattctcattggtgtgagatggtgtctcattgtagttttgatttgcatctttctctgataatcatctttttttctaaatgtctttatgctacctctaaaatgttctacgtataataggcaaatcaaatgtttaataaactggtgtgttaggtttattttcaggttgaaatgaagatagttatttttattttgtgtaccttttacatatcaacttacttttagaagtatttctaacttgtgttttgtgtttttttagagaaaatattctctttggaatgggaaatcctctgcttgacatctctgctgtagtggacaaagatttccttgataagtaagtattaaactcttcatatgcactatgtggaacttacatttgaagaagaatggatgaaaactttagaagtgaatttaccaccgaatgtcttcaattaaaggaaaactcaggaaatttaagtttggtgatagcaagtgtgctatcattaactattgaataactgagtacagttttccttgggaaaacttatatacattgctatttttacttaaaacttttttgcttattatttggaaggagaaaagtttatataatttacctaattatttaattccccaacttttaaactactgtcagtgagctacgtctataatggtatcataatctacagacattctaccccgaatgtgcccagtctggtttcctctcagaagctataatgggagaagaaagatgattagagaagacaagagaacgtgcaggatataattcagaggatatgaagctctgctgtttccgctttattagtaacttccaatgtttcaacttagctgagaaatcagtttgtttatttacctaagtatttgaggccatttcgtacaatagtccccacttgtgtccttgttttcagtttctgaggtctcagttacccataggacagtgtaataagacattttgagagagagacatgcaccacgtccacataacttttattacagtatattttaatagttgttctatttttagttagttgttgttaatctcttattgtgcctaatttataaatgaaactttatcatagtatgatgtgtaggtatgtatgtgtaggaaaaacagtgtgtgtgtgtttgtgtgtgtgtgtatatgtatgtatgtatgtatgtatgtatgtatgtatctatctatctatctatctatctatctatctatctatctatctatctatctatatatggttcagtactatccatggtttcagatacccactggtcatcttacaatgcatctacctcggataacgggggcactactatatggcaaatttaagtagtaaaaaagattaatgatgagaaagcaagatcccccctctcctcacacaccctgatttctgtacccaagagtaattactttttaaaaaattgaggcaaaatttatatcgcataaaattgatcgttttaaccattataaagtatacaattcagtgactgccagtatattcacaaagttgtacaaccatcaccactatctaattcaggacattttcatcaccccaaaatgaaatcccatacccagtaagtagtcattcgctattccctcctctaacccagtctcctgggaactactagtatacttagtttttctatgaatttgtctattctgagcattttatagaaatggaatcatataataatatatgatcttttgtgtttatatatatgaccttttgtgtttgggcttattttacttatgtaatgctttcaaggttcatccatgttgtagcatgtatcagtccttcattccttttaatagtggactattccattgtgtggatagaccacattttgtttatccattcattggttgatggacacttatgttgtttttattttttgtctattaggaacaatgcttcttatgaatattcatgtataagcttttgtgtaggaatgtgttttcatttctcttgggtatacacataggagtggaactgctgggtcacatggtaattctgtgtttaacttctagagaaaccaccaaactgttttccaaagcagctgcactgttttgcattcctaccggcagtgcataagtgttccagtttctctacgtctttgccaaagcttattttttattttttaaattatagccatatgagtgggtgtgaaatgatgtctcattgtgattttgatttgcatttttctattgaaaacttttgatgttagcatcttttcatatgcttattggatatttgtatatctttgggaaaatgttgaagctctttgcccattttttaattgggtcgttgtctttttgttaagttgtaaaagttctttttatattctggatactagaccctatcagctagcatatgatttgcaaacattttctcccattctggggatttactttaattttttgatagtatcctttgatgcacaaaagttttaaattttgatgatgtccattttatttttcttttgttgcttatgcttttgctgtcatatgtaagaatctattgttaaatccaggatcacaaagatttgtgcctgtgttttcttctaagagttttgtagtttaaggtcttagatttaggcatttgatcaattttgagttaatttttgtataaggtatgaaataagggttcaactttattcttttgtgtgtggaaatccaattgtctcaacatcatttgttgaagagactattcttttccccactgaatgatcttgatactcttgacaaaatcaggtgaccatagatatatgggtaaatttctggactccattctattccattgatacatatgtctgtccttatgccagtatgacattggtgtttttgtgtatgtgtgttttgttttttgttttttttttggagacagggtcttgctctgtcacccaggatggggtgcagtgatgcaatcatagctcactgaaaccttgaactcctgggttcaagtgatccttctatttcagcctcccaagtaactgagactatatgcaggtaccaccatccctagctattttaaatttttttttgtataaacagggtctccttatgatgcccaggctggtctcaaactcaagtctggcttgatcctaggcccaagttgtcttcccaccttggcctcccaaagtgctgggattataggcattagccaccatacctggcctgtacgacactgttttgattactgtagctttgtagtaaattttgaagtcaggaagtgtcagtcctccaactttgtttttcaagattattattattattattattaatttttaatttgagatccctcacaattccatatgaatttttggggatagctttttcatttctgtaaaaaaggcagttggaattttgattggaattacattgaatgtatagataaatacatgattaagtcttccgagttatgaagacagaatgtctttccatttatttaggtcttttttttttttttttttttttggagacagaatcttgctctgttgtccaggctggagtgcagtggcatgatctcagctcactgcaatctccatttcccgggttgaagcgattctactgcctcagcctcctgagtagctgggattacaggtgtgtgccatcatgcctggctaatttttgtatttttagtagagacagggtttcaccatgttggtcaggcttgtctcaaactcctgaccttgtgatccacccgtcttggcctcccaaagttatgggattataggtgtaagccactgtgcctagccttaggtctttttaaaataattttagcagtgtttagtaggttttcagtgcataagtcttatacttctttggttaaatttaattttattatttttgatgccattgtaaattgggattgttttattttcttattgttcattgatagtatgtagaaatataagtaattatgggggacaataatttttttgaaacttttttttatatcctggggattacccctgtaagtatatttggctaaactcaaatgtcaaagggtaaggcaagaatttataaatgtgtaaatttgacttacggtaatataataggaaatgtgctgggggtctaggataaactgggagatgtgttttatcctaagacattcagatagaaactttaaaacacactttcccagtcagaaaatactactatatacagttactttaatgattttagttcttttggttaccttgtacttttaaataatatactatacttacatttcttaaaatttctttttctgtcaaatttcaggctgggcgtggtggctcacgcctgtaattccagcacttttggaggctgaggcaggtgaatcacttgaggtcaggagttcaagtcatgccaacatggcaaaaccctgtgtctactaaaaataccaaaaattagccaggtgtgatggcacgcacctgtagtcccagttactcgggtggctgaggcaggagaattgcttgaacccgggaggcagaggttgcagtgagctgaaattgcaccattgcactccaacctgggtgacagagttgacactctgtctcaaaaaaaaaaaaaaaaaaaaaaaaaaaaattaaaccaagccaaaccacaccaaaacaaaaaaacccaaatttcaatggaatccattgacttctcattatggagaacgagattactggtgcccctattctttcctatgctacttcttctatctttctattctattaactgtgtttttaaggttgatgttttcattctgttatctatctataattgttttcccaactttgaatacaaattcataatgaaagttgaaaatgacttacccacattatcactctgtgtatcatttattgcagaattaagtagtgtaccaggaatgtagagcaggttaacatttgaaatgtaattagaagactgggcgtggtggctcacgcctgtaatcccagcactttgggaggctgaggtggatggatcacttgaggtcaggagtttgagaccagcctggccaatagggcaaaattccgtctctattaaaaatacaaaaattaactgggcatggtggtgtgtgcctgtaatcccagatactcgggaggctgaggcaggagaatcgggtgaacctgggaggcggaggttgcagtaagctgagattgcaccactgcactccagccagtgtgacagcctgagaatctgtctcaaaaaaaaaaaaaaaaaaaagaaatgtaattagagtaattcactatagtaagaaactaacataacagtctaagaaaactccatataattatctcaatagacaaagaaaaaccttttgacaaaatctaatatctattcctgatgaaaaaaaataacttaaagcaacctaggtaactatgtcgataactttcttaaccctataaaggttacgttaggggaaaactggtagtgtgatgcttatatgggtatataacgtatcaaattgtatactttaaatgtctacagtttattgtatgtcagttatatatcaaaggctgtaataaacagaaaataaaatcagttggacatgaattcatgggtttaaaattagatctcttttgtttgtgtagtgtgagatattttgttcaggaagtcaactaattcatggtcactattttaaaaaaatcatgatgtataaaagtaaagagcaacttaaaaatttgaaattttatcgtgtatttcaaaagtaaaataaagtatagagacaaacccataaatgtagaacattttatatgggaagcaagaattgaaatttgggatatacacacagaccaggtggtctttgctatgtctgaagaagaaagataagattggaagttttataaaaaggtgaaatgttttgtattgttttgaaagaaagctcattggcactagttttggggaggtggcaagctttgattggtgagtgactgcagtgagtagaactagtcttttagagtcacagctcattgtttcagtagctactggataaaactgttttcagatgacaacaggcagtttcagcagccaggcttgcagagaattaccttcttggagcaatgttatgtgtgctgagtgctcttccccccagcctgtcacctgttttagtcagatatgacaagaatgacccaatttatatgattagctttcacacatatataatcagtgttgttattttggtgaacatgcctccagatgtttgttaggcatatataacctgaagatgaatgtttatgggctaatactatgtgtagtctttgttagtatgctgtttttcactcaacattatgtttttggatcactgtttttaaaatttcaggcaaatgtgatcagagtgattatgacttggcagctgtgtgatgatgtcacaggatccttagggtgtcgcttttccagccagaagccactgtggttggtggagcctttgcctgaggtttgcttgtgcctgccaggcttgttctgcttgtttggcctggcaggctgcgttcggctcatgctaccagcctggatcccacacctgccaagggcgagccaggtgcagagtggcgtggcaaagagtgtgtgagcaagcgaatatgggatctggccactgtgtacagccactcatgctggctgctgtggtggggtgggcatctccaggcactggcacaggtgctggcttcatgcaagcttgcggctggatctgatgcatctcaagtggcttccactgtaggaacccacgtctggacgaggataatatggtggtgcccagaagcttggagacaccagaaaccacagagccccaaagagagtgtcacagccctggattgggaaccccctaggtctgggctctcagaagggctgcagctcttctttccttcttgttgcctgcaaggtgctgagtggggtgaggcatattttagctctgtttgtgttacagctgtttcagtcctgccacttggtgggtcttcttatcctgcatccatgaacagtgaggtatggggacaactggagggtgagcaaggtggagaggagcttcattgagcaacagaacagctctcaggagacccgaagtgggtagctcctttctgcaggcaggtcgtcctgacaagtgttcacctctcagtgagatgagaccccgagggggtaactcctttccacagttggtagtcccaggtctcttctgtaagtctggctgagtccagggtttttaatgggcttcacaagggagaagtgtgtgctgattggtccatgggcggctatgggtgggtctggaaaaagcaccatgagtctcactcccctcagtggaccccacctggaactgatagcctggcccccatgcttcaggctgtccctggcttgaaggcagggcttcacctgaacccaccccttttttcccaggagagtgtctgcctcctgctgccatcaatcatgttgtccacagtgtgcaggctgttggtgatgagggtacttgctggccccattgagctgccctcagtcccaccttggcctccttcccatgcttctctgcacctaaagtccagagggggctgagggggcagggggctggtatgtcagtgctgccccgagcacatgcacacctgctgggttgtgacagtgcctgggcttggccacgactttgctccaccctggagcaggtgctgggatcgaggagaggccaggcatgggaacaggcacttctgagtctgcaggggaaagggggacttcccgggccccagagagtgcagggatacctgggtccacagccatggctgggtggctgcagctgcactcaggagggtggggctccagccctgccaacttggaagtgggtgtggctcccacctgttcccagctcccatgggctctgtggagcatgcagccctggctgcatctccccaattgtagccagtgtctttgcagcagctgctctagacagcctgctgctgccatcaatgacgctgctgggagctcgagtaacttctttgttttacatgttttactagcagctggtcctaagtggctagctgaagttctattttatatttggaaggttttaatctttaactttgattttcaaataagtacttgaagataaaaaacaagtctttggaccctaacaataaaagagtcttctctattgttactcctggctatttcttccaaatatatttaaaaacttaccttatgatataaacgaatcgtgtttagcctacattttgagccaccattagataagtatttagataagtactatgtatatatatattttttatttttttatttttttattttttatttttgagttggagtcttgctctgtcacccaagctgcagtgcagtggcgcaatctcagctcactgcaacctctgcctcccaggttcaagcgatcctcttgcctcagcttcccgagtagctggaactacaggcatgtgccaccatgcccggctaatttttgcagttttagtagagacagggtttcaccatgttggccagggtggtctcgaactcctgacctctggtgatctgcccacctcggtctcccaaagtgctgggattacaggcatgagccaccgcacccagcatagataagtggtatattgctatggtttgaatgatggtatcctctccaaaaattcatgttgaaacttatccccagtgtagcagtataagaagtgtgactcttgggggttgaccaagttatgaaggctctgctcttatgaatggggttagcacacttgtgaaaggactcaaggttgaagggagagctctcctgcctttacattccttctgtcatgtgaggacacagtgttcctcccctctggaggatgcagcaacaaggttccatgttagaagcagagaaaagcctcgccagacaccaatcttgctggtgccttaaccgtggatttcccagcctccaggaatgtgagaaatatatttctattgtttacaaattaccccaaacaaaataagaaaaataaaacaacaacaaaacataagtaagtaaataaataaatagcctggtctgtggtatttttgttatagcagcacaaggggaccaagacatataccaaatgaatgagatatatactgattagtatcttacactgtgaaagtgagttctaattgtcaaaattcatttgataaaatatttttctgattctgatttttttttttttagagacaagtttttctgtttcccagactggagtgcagtagcacaatcatagcctagtcactcactgcagcctcaaactcctgtccctcccaccaaaaaaagaattgaaagttattaggaacacctgtggcagaaagtacattattgaaaagaatcttttctagtaaactgtagggacacagtgggcatgaggggataggaaatgtggaacatatgaatacctccagttgagccctggtctgtaattatggaggtatgtattaatagggatgaaaaaggcagggaaggaatgtgtaaggtaggtttgccttggtttttcctgacactagataaatatgaaagtaagaggaatgagagaatgaatgaaatggtaattgagaaaggaaaaccatcagtagaaatgaaaatactcagttttggctgggcgcggtggctcacacctgtaatcccagcactttgggaggccgaggtgaacggatcacctgaggtcaggagttagagaccagcctggctaacaaggtgaaaccccatctctattgaaaataaaaaattagctgggtgtggtggcacacgcctgcagtcccagctactcaggaggctgaggcaggagaatcgcttgaacccaggagcggaggttgcagtgaaccgagattgcgccactgcactccagcctgggcgacagagtgagactccatctcaggaaaaaaaaaaaaaaaaaaaaatagaaaatactcagttttatgacaggagtagttgaggagacgtgtttttcttacagatctaaacctttaataaacatacaaaccttacatgagtttttattaatctgagtatgcatgaaagatgttacttaatgttcaaacctaaaatgcccgaagtagctggctgtggtggtgcttgcctgtagtgccagctacttgggaggctttagctgtagtgcatcatgattatgcctgtgaatagccactgcactccatcctaggcaatatagtgagaccctgtctctaaaaattaaaaaaaggaaaatgctcaaagtaattggccataaattttagtgctgattattcagtgccaataatttacaactgaattatttctataaataaaaatttatttcttctacaaatgggtgtatgttagctttgaaagtgaaaaaaatatttagtgtcaagtgagactgcatgtgttaggttaaaagctagacatttaattgttttgctttaaaatgaattgtaaactgctctgacacttttgtagttaattttttttttctttgagatgaagtttcactgtcgctcaggctggagtgcagtggcatgatctcagctcactgcaacctctgcctcccgggttcaagctattcttatgcctcagtctcctgagtagctgagattacaggcatgtgccaccatgcctggctaatttttgtatttttaatacagacggggtttcaccatgttgaccaggctggtctttaactcctgacctcaagtgatccacccacctcagcctcccaaagtgctgggattacaggtgtgagctaccgtgcccggtcttttaattaattctttataaagctattgccatatttttttctacagctttcaacattatgttttgtatatttaggtctttaattgacctgaatattctgtctgggattttgtttagtatttatggattaatttggaaaaaagagatctttaccaacaaattttcttatccttacaaatatttctttctgtattttaggtattcttctattatcttttaataacatgtaaaatttaaatacatttaatatgggttacaaaatggttaggctgatttttttaaaaaacgtatacatcttatggtagtgatcatttgctaaatctgttagattcaaaaattctaaaagtaaatgctttttagaaaaaaattcagaccatgtagaagtcaataaagtacaaatgaaatctggggtcagtatctttgcagcagtgtgtgctgtccactagaatgtttcatgattatggaaatgttgtgtatctgtgctatccaacatggtaaccactagtcacatttggctttgatcatttgaagtgtggctagtgcaactgatgaatttcaacattttatttcatgttaattaaattttaatagatataattagcatatatgatattaaccagtacagcttaggtttattgtaaaattttacatttctttttatatgtttatattttttaaaggtatcttcaaaaaaagttgtatctattgtgtatatgatatatttttctacaacatattctagattattggtggtgtttggaaatgcttcttaagtttgaatattttctcttatttgactaccttgtgacctacattaacagatagtctttggttattctgcttctctccttcaaaattctaaattcttagaatttgaaataaactgctatttgaatctttatgtcatttcacatattgagtgattggtcctgagttgctctggggcttcctcaaaaaacaacctaaattatggatactaaatgaacacagactactttccttcattttgcccaaatagatgctgttctttgggttctttgatgttcaaacttaactttgaatattgaaggaaatggtacttctaaggataagtaaacatagattcttttttaacagttcatttcacagctcaacacacactttttggagcatatgttttatggttactcttttgccaaatactgggaatacaatattaaataactgttttgcctttaagcagcttgtaatctaattgaggagacagatgtggaaagaaatcacttacttcttcacagtggcattatagaatagaggttaagagtgtgctctggagctgtgtgaccttggttatctatggaagctcagtttccttgtgagtaaaataaggttattagggttcttgtgaggattgaatgagattatttgaatgtttggcatatgttagctaatattactggctactgagcttgaaatctctcgtgcctctattattggcaatggagagcacttgagagatttaagcaggcagatgacatggttggattcatattttaggattatgtgaattgctttgtctgtagtggatcaatagatttgaggaggctatagtgataaacctgttgcgagatgatgacttgatcactttagttatgatagaatggttgggaagagagtgcagtaatacttttcgtgttatcaaggtaagacttgattgatttaatgaagagggtaaaaggagttagagataacatttgaatttttggttttggtgactgatggtggtatttacaaatgagttagggagtataggaggaggatatggaagaggggcttgaaagattgaattgagttttgttcaagcttgagatgactatgatatccaggcaggcatattcaggagacagttggatttatgtttttggtgggtagaagagtcatggctggactccttttgtttctggagacagggtcttgctgtgttgcccagtctggagtgcagtgagtggtgctgtcatgcctccctgtagcctcccaggcttaagcgattctcttacctcagcctcccgagtagctgggactacaggcatgtgccctaccatgcccagctaattaaaaaaaaatttgttttttagagatgggtctcactatgttgcccaggctggtcttggaatcctctgacctcattctctcaaagtgctgggattacacatgtgagctacagtgccttgcctggactctttaattgtatttaattttacatagtttgacgcaatattattcaataaatggtagctattactagcactatttttattattatgtggctggtatttaaagcaaccagtagatgaaactttctaaaaaaaaagaaagagtaaaaagtaaaaggagtgggctggaagctagaacatttaatagatggatagataaagaatgagtatagaatgagattaagaaaaagcagaactaagacaagctctgatgaagtatgatgagtttatataagaatagtcaataatacctgatgcaacagagatatctagtaaagtaatgcctaaaagggtcccctgtatttgaatgggatgtcagtggcgccctctgccaggcaaatcacagtgcaaatatggagacagaagccagaaataaaatgtattagcaaataaatgggaggttgatataacatgggccggttttgctgatgtgacccaagagctaagcagtgatatcaatatcttccaattccaaattttaaaatgtcctttaataaaatatgtggctagtcattttgaacaattatcagtaaaatttttaaaataaaaagcataagaaaaattaagaatacaaagagtatagttctattttaggtatttaggtttaaatctagtttaattctttcagctttctctaattgagttttaatcctcgtttactttgctaatgagatttaaaaatattattttcataaaccttgtaactttttgcttttttattctaaccctgtgatttactcttaatctatttctttataagcttcttaaatttcagtccagctttagtctcaaacattgttgtagtgattaatggttttgcccccccattttcttcctttgtaatatattttaatcaacttttttttaaattggaagagccaattaaatatgttgtttaaaatcttgccatatccacactgtctacctgattggttttgccaattctgtaaaactttacttgatactgttgggattctttggactatgtggcaatatttgtagatttatagaaattttactgatttaattcttggaaggcaattttagttccaagtatttatagaatattttattgtcatctgctatgtaccaagtcttaacttgacattaactgtgcaacattaggcatggcacctctcttatgactgtcctatttcagaacttcacagtctgttcctgcgcctttcaaggcactaagctctgtgctatgctgatcttcagaggaggagcacatttgaataaaaagtgtttgtttcagtctcattaaaaggctcttataaaagttatgaacatttaaaagtgccctttcctccctttttgagctaattgaattcttcattttataggggtagaagattccaggaagagggggcagggatgagtatttatcataattgttaaataatgcgctggacactttttgtgtaatgttatttgatctggatagcaaccctgtgacataggcaggtttatcctcattagagaaattaagtggcttgcccagttcagaaaacaagttaatgtcagaatcaggatgatattgcaggttttttgatttgtatctagtgatttttttcactcagttgttctctttgtaggggctagaggcagaataaagaggccccttccctgtgctccctcttgcttccccgtcttctattctttggagtgtatgtcatttttctccagtaatttagggcagaaaaaaatgttgaggactaccactgtaccattttgttgtctctgatttttaggaactatgttcatggtaagaattgattataaaagaatacctatctatgccattagaaaacaaaacatccaaaatataggctgtgctttgcatcattctatgaaagccatggtgggaagttgggttatagctttctactaagttgaaagtaggctctgtcgcctaggttggagtgcagtggcacaatcttggctcacttacaacctccatctcccaggttcaagtgattctcctgcctcagcctccccagtagctgggaccacaggcgcctgccaccacgcctggctaatttttgtatttttagtagagatggggttttgctgatggggtttcgctgtgttggccaggctggtctcaaactcctgacctcaagtgatctgcctgccttggcctcccaaagtgctgggattataagcatgagccactgcgcccagctaatgatttttaataactttatataatactgataaatcactcttttttttttttttttttaagacagagtcttgctctgtcacccaggctagagtgcagtggctcgatctcggctcactgcaagctctgcctcctgggttcaccccattctcctgcctcagcctcccaagcagctgggactacaatgcctggctaatttttttgtattttttttagtagagacggggtttcaccatgttaaccaggatggtctcgatctcctgaccttgtgatccgcccgtctcggcctcccaaagtgctgggattacaggcgtgagccaccgcgcctggcctaaatcactctttttagtggactctaaataccactgtgatttgataccccttttattcatttataaaaatacataaacagcttccttttttgatgtttaaaaattttatagtcctttctgtcttgaatttgcatttctgttatacttttcacaccagattctattcttatatgatgtattttatgcataagttatattttgcctgtaacatgcatacattatgaaggtagtatatttttatgcattacagtctttcatgcatattgattaccctattatatgtctttgcagccagccaaaatgtgtaaattttaaaatatctcttagtcattaaattgtaattagcacacggtaaaataacaaatgtattaaaatgttgctaaattattttttatttattaaaaaaattttttttctccttctctgccttcaaaatgttgcttctctgccttcaaaatgttggtacattattaaacagaagaaaataggccaggtgcagtggctcgcacctgtaatcctagtactttgggaggacaaggtgggcggatcacttgaggtgaggagttggtgaccagcctggccaacgtggtgaaacttcgtttctacttaaaatacgaaaattagccgggcgtgggggtgcatgcctgtagtcccagctattttggggactgaggcacgagaattgcttgaacccagcaggcagaggttgcggtgagccacaatcatgccactgtacttcagcctgggtgacagagtgaaactctgtctcaaaaaaaaaaataaaaaaaaaaaagtttcacagacaaaatatgaatcattccttgtttaacacttaaaaggtttttatactcaggcaatagaatagtgtatagtttcattcacaataggtgaggagtatgtcatcctttttatattaataaaaagtgagaggagcccagatggccgaataggaacagctccggtctacagctcccagcgtgagcgatgcagaagacgggtgatttctgcatttccatctgaggtactgggttcatctcactagagagtgccagacagtgggcgcaggtcagtgcgtgcagcgcaccgtgcatgagccgaagcagggcgaggcattgcctcactcgggaagcacaaggggtcagggagttccctttcctagtcaaagaaaggggtgacagatggcacctggaaaatcgggtcattcccacccgaatactgcacttttccgacgggcttaaaaaacggcacaccaggagattatatcctgcacctggctcggagggtcctacgcccacggagtcttgctgattgctagcacagcagtctcagatcaaactgcaaggcggcagcgaggctgggagaggggcgcccgccattgcccaggcttgcttagctaaacaaagcagccgggaagctccaactgggtggagcccaccacagctcaaggaggccttcctgcctctgtaggttgcacctctgggggcagggcacagacaaacaaaaagacagcagtaacctctgcagacttatatgtccctgtctgacagctttgaagagagcagtggttctcccagcacgcagctggagatctgagaacgggcagactgcctcctcaagtgggtccctgacccctgacccctgagcagcctaactgggaggcaccccccagtaggagcagactgacaactcacatggccgggtactcctctgagacaaaacttccagaggaacgatcagacagcagcattcgcggttcacgaaaaaccactgttctgcagccaccgctgctgatacccaggcaaacagggtctggagtggacctctagcaaactccaacagacctgcagctgagggtcctgtctgttagaaggaaaactaacaaacagaaaggacatccacaccaaaaacccatctgtacatcaccatcatcaaagaccaaaagtagataaaaccacaaagatggggaaaaaacagagcagaaaaactggaaactctaaaaagcagagcacctctcctcctccaaaggatcgcagttcctcaccagcaatggaacaaagctggacggagaatgactttgacgagttgaaagaagaaggcttcagacgatcaaactacgagctacgggaggaaattcaaaccaaaggcaaagaagttaaaaactttgaaaaaaatttaaacgaatgtataactagaataaccaatacagagaagtgcttaaaggagctgatggagctgaaagccaaggcccgagaactacgtgaagaatgcagaagcctcaggagccgatgtgatcaactggaagaaagggtatcagcaatggaagatgaaatgagtgaaatgaagcgagaagggaagtttagagaaaaaagaataaaaagaaacaatcaaagcttccaagaaatatgggactatgtgaaaagaccaaatctacgtctgattggtgtacctgaaagtgacggggagaatggaaccaagttggaaaacactctgcaggatattatccaggagaacttctgcaatctagcaaggcagccaacattcagattcaggaaatacagagaacgccacaaagatactccttgagaagaccaacaccaagacacataattgtcagattcaccaaagttgaaatgaaggaaaaaatgttaagggcagccagagagaaaggtcgggttacccacaaagggaagcccatcagactaacagcggatctctcggcaaaaactctacaagccagaagagagtgggggccaatattcaacattcttaaagaaaagaattttcaacacagaatttcatatccagccgaactaagcttcataagtgaaggagaaataaaatactttacagacaagcaaatgctaagagattttgtcaccaccaggcctgccctaaaagagctcctgaaggaagcactaaacaaggaaaggaacaaccggtaccagctgctgcaaaatcatgccaaaatgtaaagaccatcaagactaggaagaaactgcatcaactaacgagcaaaataaccagctaacatcataatgacaggttcaaattcacacataacaatattaactttaaatgtaaatggactaaatgctccaattaaaagacacagactggcaaattggataaagagtcaagacccatcagtgtgttgtattcaggaaactcatctcacatgcagagacacacataggctcaaaataaaaggatggaggaagatctaccaagcgaatggaaaacaaaaaaaggcagggcttgcaatcctagtctctgataaaacagactttaaaccaacaaagatcaaaagagacaaagaaggccattacataatggtaaagggatcaattcaacaagaagagctaactatcctaaatatatatgcacccaatacagaagcacccagattcataaagcaagtcctgagtgacctacaaagagacttagactcccacacattaataatgggagactttaacaccccactatcaacattagacagatcaatgagacagaaagtcaacaaggatacccaggaattgaactcagctctgcaccaagcagacctaatagacatctacagaactctccaccgcaaatcaatagaatatacatttttttcagcaccacaccacacctattccaaaattgaacacatagttggaagtaaagctctcctcagcaaatgtaaaagaacagaaattataacaaactgtctctcagaccacagtgcaatcaaactagaactcaggattaagaaactcactcaaaaccgctcaactacatggaaactgaacaacctgctcctgaatgactactgggtacataacgaaatgaaggcagaaataaagatgttctttgaaaccaacgagaacaaagacacaacataccagaatctctgggacacattcaaaatagtgtgtagagggaaatttatagcactaaatgcccacaagagaaagcaggaaagatccaaaatttacaccctaacatcacaattaaaagaactagaaaagcaagagcaaacacattcaaaagctagcagaaggcaagaaataactaaaatcagagcagaactgaaggaaatagagacacaaaaaaccgttcaaaaaattaatgaatccaggagctggttttttgaaaggatcaacaaaattgatagaccactagcaagactaataaagaaaaaaagaaagaagaatcaaatagacgcaataaaaaatgataaaggggatatcaccactgatcccacagaaatacaaactaccatcagagaatactacaaatacctctacgcaaataaagtagaaaatctagaagaaatggataaattccttgatacatacaccctcccaagactaaaccaggaagaagttgaatctctgaacagaccaataacaggctctgaaattgtggcaataatcaatagcttaccaaccaaaaagagtccaggaccagatggattcacagccgaattctaccagaggtacaaggaggaactggtaccattccttctgaaactattccaatcaatagaaaaagagggaatcctccctaactcattttatgaggccagcatcatcctgataccaaagcctggcagagacacaaccaaaaaagagaattttagaccaatacccttgatgaacattaatgcaaaaatcctcaataaaatactggcaaaccgaatccagcagcacatcaaaaagcttatccaccatgatcaagtgggcttcatccctggatgcaaggctggttcaacatacgcaaatcaataaatgtaatccagcatataaacagaaccaaaaacaaaaaccacatgattatctcagtagatgcagaaaaggcctttaacaaaatttaacaacccttcatgctaaaaattctcaataaattaggtattgatgggacatatctcaaaataataagagctatctatgacaaacccatagccagtatcatactgaatgggcaaaaactggaagcattccctttgaaaactggcacaagacagggatgccctctctcaccactcctattcaacatagtgttggaagttctggccagggcaatcaggcaggagaaggaaataaagggtattcaattaggaaaagaggaagtcaaattgtccctgtttgcagacgacatgattgtatatctagaaaaccccattgtctcagcccaaaatctccttaagctgataagcaacttcagcaaagtctcaggatacaaaatcaatgtacaaaaatcacaagcatttttatacaccaataacagacaaacagagagccaaatcatgagtgaactcccattcacaattgcttcaaagagaataaaatacctaggaatccaccttacaagggatgtgaaggacctcttcaaggagaactacaaaccactgctcaatgaaataaaagaggatacaaacaaatggaagaacattccatgctcatgggtaggaagaatcaatatcgtgaaaatggccatactgcccaaggtaatttagagatttaatgccatccccatcaagctaccaatgagtttcttcacagaattggaaaaaactactttaaagttcatatggaaccaaaaaagagctcacatcgccaagtcaatcttaagccaaaagaacaaagctggaggcatcacgctacctgacttcaaactatactacaaggctacagtaaccaaaacagcatggtactggtaccaaaacagagatatagatcaatggaacagaacagagccctcagaaataacgccgcatatctacaactatctgatctttgacaaacctgagaaaaacaagcaatggggaaaggattccctgtttaataaatggtgctgggaaaactggctagccatatggagaaagctgaaactggatcccttccttacaccttatacaaaaatcaattcaagatggattaaagacttaaacgttagacctaaaaccataaaaaccctagaggaaaacctaggcattactattcaggacataggcatgggcaaggacttcatgactaaaacaccaaaagcaatggcaacaaaagccaaaattgacgaattaaactaaagagcttctgcacagcaaaagaaactaccatcagagtgaacaggcaacccacaaaatgggagaaaatttttgcaacctactcatctgacaaagggctaatatccagaatctacaatgaactcaaacaaatttacaagaaaaaacaaacaaccccatcaaaaagtgggtgaaggacatgaacagacacttctcaaaagaagacatttatgcagccaagaaacacatgaaaaaatgctcaccatcactggccatcagagaaatgcaaatcaaaaccacagtgagatatcatctcacaccagttagaatggcaatcattaaaaagtcaggaaacaacaggtgctggagaggatgtggagaaataggaacacttttacactgttggtgggactgtaaactagttcaaccattgtggaagtcagtgtggcgattcctcagggatctagaactagaaataccatttgacccagccatcccattactgggtgtatacccaaaggactataaatcatgctgctataaagacacatgcacacgtttgtttattgcggcgctattaacaatagcaaagacttggaaccaacccaaatgtccaacaatgatagactggattaagaaaatgtggcacatatacactatggaatactatgcagccataaaaaatgatgagtttatgtcctttttagggacatggatgaaattggaaatcatcattctcagtaaactatcacaagaacaaaaaaccaaacaccgcatattctcactcataggtgggaattgaacaatgagaacacatggacacaggaaggggaacatcacactctggggactgttgtggggtggggggaggggggagcgatagcattgggagatatacctaatgctagatgacgagttagtgggtgcagcacaccagcatgtcacatgcatacatatgcaactaacctgcacaatgtgcacatgtaccctaaaacttaaagtataataataaaaaaataaaaataaataaaaagtgaattttaggccattttctgttacttagaatacctgaaactgggtattttataagaaaaggaatttatttcttacagttatggaggttgagaagtccaaggtcaaagggctgcacttggtgagaaccttcttgctgatagtgactctacagattcctgaggtggtgcagggtatcacatggcaaggggcctgaacctgctaatggtagctcaggtctcttctcttcttttaaagccaccagctcccctcccatgataacccattaatccatgaatggattaatccatttatgaaggtggagctctcatgatccaattacttcttaaaggccccagctctcaatattgccccgttggggattaaatttcaacatgagatttgaggggggtcaaatattcaaaccatagcagtgggtttaaaggtacttgtgaaagaggagaccagagaggaaaatcaacatgacctttcaaatggacctatgatccattttcaggcagattaattttaaattttatgaaagggttgagtatgaatgagaattgaagacctgggaattgttgtccattgttgtttatctatttctgtgtacccttcagaaagtctgtttaccttcagcagtacaaatatatggtactgtgaaagatccctgatctagtatttatagcaacctgtattttatgaccagagaaactgagacttaaagatgtagagtacttgcctatggtcacttagctagtaaatggtcaatcaaaaactccaaaacttgaggccgggtacggtgactcatgccagtaatcccagcaatttgggaggctgaggtggttggatcacttgtggtcaggagttccagagcagcctggccaacatgttaaaaccccttctctactaaaaatacaaaaattagccaggcatggtggtgcgtgcctgtaatcccagcttctggggaggctgagacaggagaatcgcttgaacaggttgcactgagtcaagatcgtgccactgcactccagccttggtgacagagtgagactctatctcaacaaataaacaaacaaacaaaaaacacacaaaccctccaaagcttttctttccctcctgtgtcatgctacttagtacatagcctggttcacagtatatgattactatatatttaatgaatgatttacatattatttgtgaagtccaaaatacttaacgttgtagttgttccatcagttttgaactgctgaataagtgtgacattacagatgattcactacagaagaatattgaagatcttcaaagcattgttaaggtgatctcctttcagttcctggagtggtgttcctggaaatgactaatagaacagcaaaaaaccgtctacttgggcattcttggtgttttatcaattaagtcagagacctataacagtgttggagtgcttgttttgaagaggtcagctaacttacgttgacactgtgtgtgtatgaagagtgtaattttcgtttctgttatacaggtattctctgaaaccaaatgaccaaatcttggctgaagacaaacacaaggaactgtaagtgcattaaaccattggttgtaaatagtttactctgtctatgaacttgatatatgtatatgtaaattatctgattttcaaaattatataatgacaaagtataattaacactatgaccttaatcctaacaattatgataacctacactatataatttacactacataaagtttacacaggacataatttctcctgtattcacattaaaagatgtagtgttgtattccatcatctagactaaagtcttactgggaaatatgtcatgctattttctctttccagataaaatattaaattgttcctattttctttctgactgctctaccagaaaaaagtaaaaaataaaaataaattgtcactcttaatttttgggtcttactccggtggatcacccaccttcatggtaatgatagacaaatataattttgtttctgtcactggtttatgcaaaagtaaatgtcaattgtttggtacaaggtaaaacactttattttatttttatttttttgaaacagagtcttgttctgctgcccaggctggaggcgcaatctcggctcattgcaacctctcattcctgggttcaagcaattcccctgccttagcctcccaggtagctgggattacaggtgcccgccaccatgcctggctaaattttgtattttaagtagagatggggttttgccatgttggccaggctggtctcagactcctgacctcaggtgatctgcctgccttggcctcccaaagtgctgggattacaggtgtgagccactatgcctggctgaagacattttattttcacatctaactcaggtcgctcttggtttagtttaatgtaaccttcacttgtactcatttatagggacagtaattttttttcgtagaggacttcaagactattattttcttcttgagattaagtaataatttttttccaagtacttttaaactgctttttaaaaactgtcttgaaccttttgtaaattattttcttctctcctatttaaggtaacataaattgttaattataaaatggcaggaccaatgttcagggaaaggattttcttatgcgttcttaccgtttacacattccactattatgctaacctttcatcagtatttttatatttggcctatccttatttgagtataatctccatagtgggttctcaaatatatatattgtcaagaaatttttttgctctttctttatttcctagtatagtcagtgagggccggtgattgttactgtagcattggttggttattatttataggtctggtaacagagcttcttttgctttgggaattaagtagttggtgagccttaaaagttcctttagtccttagactatgaccaatattaaaaataccagaaatctgcttttaaagaatatgttatttaatatgtaacccattttaatgttttaattcatttgaaagtttttttaactgtccaagatataattcatctctatgggtataacttggcgaactgatacttttttcttacctttttttttgtttttttgagacagactcttgctccgtcacctaggctggagtgtggtggcatgatcttggctcactgcaacctctgcttcctgggttcaagcgattctcctgcctcagcgtcctgagtagcagggattacaggcacccgccaccatgcccagctaatttttatattttagtagagatggggtttcgccatgttggccaggctggtcttgaattcctgacctcaagcgatccacccacctcagcctcccaaagtgctgggattatcacaggcttgagccaccgtgcccagcccctacattttattacgaaaagttttaaacatatgttatgtgttcacccatatatttaccaccaaggttttatcattaacatattactgcacttgttttatctatttattcttctgttcgtgcattacttcatctgttttttggatgcatttcgaagtaaattgtagacatcaatatgcttctctctaaatatttcaacacatataccattaactagagttttatatttcaaagttttttttttttagtttcacctgttctaaaatttcttataaactgagtcatatatatgtcctattttgtataaggcttctgtcactccctgtgtttttgaaattcatcagtgttgttgcatatatcagttaattccttttcatttttgcagattaacattctgttgtttatttgttctattattgctaagtattgccacttgtttgatttgtcattattgatggtcttgatatttttggctgctggctctcttccttgtagtttttgacctacataccaaagaaaactttcagttgaatatggcaccataaaagcagagtattaattttaaaaaattaaaacagttattgaattaatgaatttcatgaattatgaaagctgtttataaataatctcatttgtgtctttgcaactcaaatagccaaaatcttggtagggtggtggtcatggaagtcagagtctgctaaggagtgtataacaactcacctgctgtattaaaaacaaaaaaatctttttgtgttcaagactaagctttaaacaatataagagatatggatataaaacaaaattttatctaatcagtaattccatgctttattctcataaaacattattacaacttcttaatttcagtctgttaaagcttgattaattataaaattgtaaaaatgtgttggcaccatcacattgacctgctctttgaaaattaaccctaattctataagagtaccaataagagagtacagtgatagctctaattatcttgatattaataaataaagagtggcctggcatggtggttcacatgtgtaatcccaacactttgagaggctgaggtggaaggattgcttgaggccagcagtacaagaccagcctgggaaacatagtgagaccccatctctacgaaaaacttaaaaaaggccgggcacggtggctcacgcctgtaatcccagcactttgggaggccgaggtgggtggatcacctgaggtcaggagttcaagaccagcctggccaagatggtgaaaccctgtctctactaaaaatacaaaaattagccaggcatggttgtgggtgcctgtaatcccagctactcaggaggctgaggcaggagaattgcttgaatctgggaggaaaagttgcagtgagccaagatcacgctactgcactccagcctgggtgacagggcgagactctgtctcaaaaaaaagaaaaaaaaattagcctgatgaggtggtgtgtgcctgcagtcccagctgctcaggaagctgaggcaggtagatctcttgggcctaggagatcaaggctgcagtgaaccatgatcattccactgagctctggactggacagcagagtgagaccttgcctttaaaaaaataaaaaaagaataccaataagagagtacaatgatagttctaattatcttgatattaatgaatattaagtatgttttcattaaaacatttttagttcctgaaattttgtgattcagatttcatatacacttagtcactgatgcttcacgagtatacttgtttctctgtctgaggaagattggcatgggaaaacagggaaatattggtcagcagtgacacttgtttttctaagcaaagtggtttttctcaacttcctgtttttcattattctacatactgaagaccttgggggatgattttaagtagagaaagctgagcaattcaagttgtgatgtgatttatctaaaactataggatttatagtttgttctatacatgatccagtaatcaactggtttcattagctttctagtttttttcagttttagttttgtaaatggaataatttaaaataaattaggaaaacatcactattttactaagtattttttcacctactttccattgtgctaggcattaaagaaaagatagtgtgcagctttttatatgtcaattatacttcaataaagcggtttaagaaaaagtaaaagatactgattttatttataaatggaatcttactctccaatagtggcttttcaaaatctttggacacatctgcagttattgaaaatagaaccattttgtttccatgaatatctattttatgaatatataaattttgtattaccttggattatgagatctgatcatatagatttaggtaaggaaagttaaaagttgtctggagttaggggtgaattccaaatgcaaatataaataaattcagaagtatccatactacttaacacagagtaacctggtatctgaagattttttttttgtttgctataaggcaaggggaaaatctctttaaaagggattcacatttatttacttggctttttaagatagctaccaaggtaaacagtgaacttttgtaagcagtgtatactgttctaaatatgaagtgtattttcccttctgatagtgaatgaattccattatgattttttaatgtcaaaaattaaattattttgtcagaataaccccttaaatttttaaatgttgtcttataaaagttaattatattgtgatatttaaatgcttgccaatttacgattatgatgagatggaagaaaataaataaattatgcaataggcatgaaccttcaagggtattaggacgtgctcaggatatgatctttggtgcagtgtaaaaatgtaatttcttagtgaataggtcaatttccaaaccagcaggaaagttataagtatttaaatggaatgtgtagggatatgtcagggaagttagagacaataacatctggtatgctttttttttttttttttttttggtgagatggagtctcgctctgtcgcccaggctggagtgcagtggcgtgatctcggctcactgcaagctccgcctcctgggttcacgccattctcctgcctcagcctccagagtagctgggactacaggcgcccaccaccacgcccggctaattttttgtattcctagtagagaaagggttttgccgtgttagccaggatggtcttgatctcctgacctcgtgatctgcccgtcttggcctcccaaagtgctgggattacgggcgtgagccaccgcgcccggtctggtatgctcttaaattaattgttaatgctgtgacttagcagttctttgaaatcatcaagatcatagactgggcttgtgcctataatcccagcactttgggaggctgaggcaggaggattgcttgagtctacgagttggagaccagcctggacaatatagtgagactcttgtctctacaaaaagttaacaaaagtagccggatgtggtggtgcctgcctgtagtcccagctacttgggagactgaggtgggaggattgcttgagaccaggaggtccaggctgcagtgagctatgatccgtgccactgtgctccagcctgggtgacagaatgagaccctgttaaaagaatcttttttttttttttttttggtaagaatgagctaagaactggatatctgtaaagctaatagaaaaaaatcctgtgaagcaaaaagtcaaaattgaaataagctaggaccgacagcaaggttaaatgcttatttttttttagtgttcataaataaggtacagttttaaaaatatcataaacatttttatgatcctattctcagggcccggttttttttgtatctttaaaattatagtattttgattctagaaatgaacccttgaaccaatatccgtattttatcatgaataaggtgagagtaacattgataaaatgacttgctatagtttacattgctacttaaggacagtactagaccagaaaccaagtctcctgagtcccatttaagtgctgtttttgtcacaccaagcagttctctaagtatatagtcttttttttttttttgaaacagggtctcgctttgtcacccaggctagaaaacagttgcatgatcatggctcactacagtcttgtttttagagatgaggtctccttatgttgctcaggttggtctcaaactcctgacctcaagcagtcctcctgcctctgctcccaaagtgttatgattacaggcatgatctactgcacccagccagtaacttttttttttttttttgagacggagtctcactctgttgccaggctggagtacagtggcgcgatcttggctcactgcaatctccgcctcccaggttcaagtgattcccctgcctcagcctcctgagtagctgggactacaggtgcctgccaccacgtctggctaatttttatatttttagtagagacagggtttcaccatattggtcaggctggtctcaaactcctgacctcaggtgatccgcctgcctcagcctcccaaagtgctgggattataggcgtgagccaccgcgcctggccgccagtaatttttttttttaaagggattaatatccattgcaagacttggtaacggatcacagagaactcattagttaattaaatcagtttcacagtattgtgttttggttttggaaatcacttcagacctataaccaatattgagtgagttgaaaagaattaattacttccaaatacaaggcactttacattcttctaaggagaggatgcaacacaaagctatttggtcagcttgatacaaaagctcttaggtgtgctcatgaagtaagtcaaatgtatacattttacaaccacatattaaatagaattagttttttctttttccttcccatttctttgaacagtcttattcagaatcttcatcattagcaactttgtcatcattggagcccttttctctagaacacatcagcctctttctatgtatgatattttcgctggaaattttatcctgagctataaatgcctctcatgtaagaaaagttttttttttgttttttttttgagacaagatctaactctgttgcccaggttggagtgcagtggcgtgatcatgactcactgcagccttgaccttgtgggcttaagcaatcctcccatcagcctcctgagtatctgggactaccactgtgcaccaccacacctggctaatttttgtattttttgttgagatggggtcttgccatgttgtccaggctggtcttgagctcctgggctcaagtgatatgtctgccttggcctcccaaagggctgggattacaggtgtgagccaccatgcctggccaagaaaagttttttttaaagtttatttttgtatgtagtcataatacttgtaaggtaaccttttcactgtattgctttttaaactaaggtttaaatagttcattgtaataagagttaccgtttgtgcttataaggctgcatctccaggagtaagtactaaatctgtgttagatttctttgctgcttttttttgtttgtctttttttttttcttttactgatatggtcaggtggtcaggttacttccgtaaggatccaaaactagagttgattgagatcatttcaggcttatacataatctacaaatgattctcaaccaattgagatctgagttcacctcttttgctgaacttttaattgtgatcttactgtaaaattctaggatctcataacttctatgaaatttttatacctggattataaaacttcggaaagatttgcttaaatattttgttgcttaaaagaaaataattggccgagtgtggtagctcacgcctgtagtcccagcattttgggaggctgaggcaggtagatcagttgagctcaggagtttgaaaccagccttggcaacgtggcgaaaccctgtctctactaaaagtataaaaaaaattagctgggcatggtggcactcacctgcagtcccagctactcaggaggctgaggtgagaggattgcttgagcccaggaagttgaggctgcagtgagcaaagattgcacaactgcactccagcctgggcaatagagtgagaacccgtctcaaaaaacaaacaaacaacccccccgcaccccccccccccaaaaaaaaacaaacagaaaataattaacactgtcatcaaggaaggtaactcattataaggatttaaaaaaaaaatttttttttgagacggagtcttgctctgtcacccaggctgaagtgcagtggcacaatcttagctcactgcaagctccacctcccgggttcacgccattctcctgcctcagcttcccaagtagctgggactataggcgcacgccgccacacccggctgatttttctatttttagtagaggcagggtttcactgtgttggtgaggctagtctcgaactcctgacctcgtgatccacccgccttgccctcccaaagtgctgagattacaggcgtaagccaccgcgtctggcctataaggaataattttgtgattaaacatggtcttatattcatgaacgataggtgaatgaaaaatgtgtgttattggtggtaaaatcttaaaatccttaaagaattaatttaaattgctaccttctacttatgaagcactatatggtgccctggacttagcattagaagaaacttagtttatgtatgagttttgccataggctgtagtcttggggtattagttagaattcaatgccactatgatattaagaaatttattacaggaattaaatcttattcaatcatgagaaaaactggggatattaaggtccctaaaatgtgagagaaaaatcgctaaactgccttttgatgtaggttaatgaattgcgtgttctgttaatagggaaactgtgaaggaggttcgtgtgttgtgggctctttgcaactaccacctttatgggcctttagtgaaaaatctggtgataggcttggtcctggtagttgtggacgtaaggtagagtggggatgagtaaggacagattacagttctgcccatacctttgtgtctgtccttcctgcctctaaccaatgactgcctttggaatgtaatggctactgcttcaattgcatcccctaaattttttgcaaatttctcttgtgacatatcttaagctgaaaccatataggagaggaaattaggggaagtgtactccttcttgacatagtttaataccttaactttgtttaatcacttagtcttccaaacttaagttcctccgatatcattttgggtttagattagtgcttttctgtcattgtccattaaacaaatgatttctttcattacctacttctcttttagtctgttcagtgatccctctgggtatagcttctgaatttctagcataaaactcttcaacaataacaaaaaaggataatgatctttcctgtcaatttttagggggaaggataaggtgtttcctagaaactttattcagagcactttagtcaaagtgtagttcattgatccttaactgcaatttacttgacaagatatatttatgggatgaaatttattgagggtaacagaatggagagagaaactgctggtgtgatgaattctctttcttcttggtctacaacaaacagaaatattttgagaatgtagctatggcagattttaatgtaagagttatgccaacactatttccccttaagggttgagtcagaccttttgggaatgatatagacttgggggtcttgagtgaacttttagtatttattagcagccaatctaaccttgaaaactctatgttgatttctttttggaaagtgttgaacaattaaataatacatgttaaagaacaaggaagaagggcattgttttaattattttgtgatctaatttaatccccacagcaactctgtgaagcagatattgtaatcattcccattttacagatgaggaagagacttcgtaacttggtttatataagaaaaggatagaactgtttagatctttttgattgctttccattttgtataagttcagtgacttaggaaccttttttaaaaaacttctttggaggagtgatattgttcattatgaacatacctacttgaaaagtatttaaaggtatttttcatggaaattatattttataagttttagtatggttcactagaaatacgtcacaatttgtaggtaatactgtgttttattttgagttggctaattgttaaggtaaaactttagaggataaagtgagctcatattgatgaatggtaatctgatatttccaacagactaggtctttttttgaagttcatgtattataactttattctttgtgatactagctccctctgtagaacttcaataagattgcaactggactttttcaataatttagaaaagtgatctaaacattatctataacatttccctgtaaaattttactttgtattctaatcagttgcaagtgggtttttaaaagtataaatgtaacatttataaaaatgtttcactttgtacacacaaagttttaataacatatacaaaataaaactttcttcaaacattcctataactttaatgcttttttatttaggaaggctagagagaggtgtgatttctaggtctgtaggtctgtgttgagtaaagcctgatggaagccctaggggaaaaataaattttgacgtttagctggatacttgaaattatcccttttttttttttttttctgaaactttccggtttgacttgggtgggaaaatgttcataagggattttttttttttatcttgtagagaaggggaaagcaaacttctacaacaggtagaaagagcaaagagaaaatcttagcaagatccagaaatttagtggagaattgcaggaaaacattcttgacatttacggtttaaaaaaattttcctttttctttttttcttaagaggtggtctcactctgtcgcctagactggagttgagtggcatgatcatagtgatcgttccacctcagcctcctaagtagctgggactacaggtatgtgccaccacgcctggctcctttttgtatttttagtagagatggggttttgccatgttgcccaggctggtcttgagctcctggactcaagtggtctgcctacctcagcctcccaaagtgttaggattacgggcgtgagccactgcaccctgctcacatatatgagttctatgagtttatgctgttgttggaaaatcctttgttatcaaagtctaccaattttcctgtgtgggagtgagcttacttattttaccaccactttttctcctttctttctgctatggtttgaatgtttgtcccctccaaaactaatgttgaaatttaattgccattgtaacagtaataagaggtggaggcctttaagaggtgattagatcatggggctctaccttcatgagtgcattaatgcaggagtgggttagttatctcttagagggttgttataaagtgagtctggcccctcaagcacttgcttgctgtttgccttctgccatgggataatgcagcaagaagttgctgagcagaagctggcaccatactctaggacttcccagccttcagaactgagaaacatattaatgtttctttcctttataaattacccaatctcaggtttctgttaaaagccgtagcaatcaaactaagacactcccctaaaccattttatattaaattgtaagttgtataattagctcttcaaagatgttttctcagacataatgtaagctcaatgaaggcagaggaaatatgattgacttgcaacatggaatttagaaaaatgagcgaactgatttcaaccataaagctagggactaaaacatacaaatgaggataagaaagaactgaagtacatatgctctttcagtttctaaaaatttaactgtattttcttctaagtagattgaaggatgttcttaggattatgcttgagtaggcttttaaacaattttgtgtggataattatctttgaagcctttgttagtactaaacatctttattctgttataatacagtttattcaaacagacgtacagtgtgtattgtggcacaaagaaattcaagaatgattcttattctttttgtttgttggccttgactaaatttgataccagataattgctttaaaggataggccaattttattggtataacaaatctacccttcattatccataaaccacttatatagtaatctggttttcctatacaggcacaccttggagatattgggggtttggttctagactatcacaataaagtgaatatcacaataaagagaaatacatgaagattatattccccagtgcatataaaagttgtggtgatatcacactgtaatctattgtatacaataacattgtgtataaaaaatgtatatgccttaatttaatgtaatctattgtatacaataacattgtatataaaaatgtatattccttaatccataaaaatactttatggatgaaaatgctaacaatcatctgagcctttagcaagttacaatcattttgctggtggagggtcttgcctcagtgttgatggctactgactgatcaggatgttggttgctgaaggttggagtgtctgtggcaatttcttaaaataagacaataatgaagtttgctgtgtcagagccttcctttcatgaaaaatttctctgtaatatgcaatgctgtctgatagcatgttacccacagtagaatttggaaaattggagtcagtcctctcaaaccatgctgttactttatcaacttaagtttatggaatattcaaaattctttgttgtcatttcagcagtgttcacagcatcttcaccaggagtacattccatcttaggaaaccactttttttgctcatctataagaagcaactccctgtccattcaagttttatcatgagattgcaacatttcagtatccatcttcaggctccacttccaattctagttctcttgctatttctaccacatctgcagtgacttcttccctgaagtcttgaagcgctcaaagtcatccacaagggctggaattcacttcttccaaactcctgttaatgttgatgttttgacctcctcccatgaatcacgaatgttcttaatggcatctagaatgatgaatacgttgcaggaggttttcattttagtttgtctgatccatcagaggaatcacggtctatggcagctatagtcttgcaaaatatatttcttaaataataagacttgaaagtcaaaattacttcttgatttgggggttgcagaatgaatgttgtattagcagccatgaaaacagcattcatctccttatacatctccatcagagcacttgggtgactgggtgcatcatcaatgagcagaaatattttaaaaggggccaggcatggtggctcatgtctgtaattccaggactttgggagactgaggcaggcagatcacctgaggtcgggagttcgagaccagcctgaccaacagggagaaaccccgtctctactaagaatagaaaattaggtgtggcagtgcatgcctgtaatcccagctactcgggaggctgaggtaggagaatcgcttgaacccaggaggcggaggtcatggtgagccaagattgcaccattgcactccagcctgggcaacaagagtgaaactccatctcaaaaaaataaaagcctagcctcccaaagtgccaggattacaggcatgagccaccgcgcctgtctgtccgcccgtcttcttttttaagagcaagaaaaggtttcccagaagtactctggtagattcttatcacacacacattcctaaaccagttactggcaaagaaaatagaattatcatgattaattagcatattctgaagtacatgcttccttataactgaacaaaaattagagctccactggcaacgcggaaatggctgttgacttggcaactaatagtgaattgctcacaatgtttaagtgaaatggcctgtcagatttcctgggaacacaggaaccagggccagacttagaaacggcctcagtaagaggttttctaaaactattttctggtatcgtaattattcctaattaccttgtgcactaaaaaaatttaaaaattttaaatttagaattttaaacacatttcctgacagtaaccaagatataaaaatgtgtaaaattgagtgaatatattttaaagcatggaagatttgtgttaccctcagacttgaaagggaacctgcaaagttatggtctcatgggaaatattgtttctttttgccttgacataattttcaggctctttggttttattctaagcaacccagcagggcacctttaaaaagaaacaaacaaaattactgtctctaaaccaaagaagatagaaaaatacattcaggagaatagtatacattgaaaactgccactttagctagtgcttttttttttttttttttttttttaagacggagtctcgctctgttccaggctggagtgtagtggtgcgatctcagctcactgcaacctccaccttccagtttcaaatgatacttatgcctcagcctcctgagtagctgggattacaggggccagccaccatgcccagctaattttttcatatttttagtagagagtactttttaactgagaagagatgctgtaaagttttaggaaatcacagtggggacagtagtcatacttctactttcttctgaatataatattgtttcttttttctcctgcagttacttattttttttttctttttgctttaaggcttggtagttctgagaattttagattcagttataatcgaatgtaactatcaacacatgttatggagtagtataaattgttacttgatgtttggagttgttttactcagtcactcagcaaaggtaagattagatctccgttagatgaaaagtattatctcttatgcaaagagacattggttagctctggatgaagacaatggctatggggtcagtcaaccttgtagaaagaataggctaggcacagtggctcatgcctgtaatcccaccactttggggtggtcgaagccagtggatcacttgagcccagcagttcgagaccaaactcggcaacatagtgagagccccctctctacaaaaaatttgaaaattagccagggcatggtggtgtgtacctctggtactagctatcaggaggctgaggtgggaggatctcttgacctggggaggttgagtctgcatgcagtgagccatgattgcgccactggactccagcctgggtgagaaagtgagaccttgtctcaaaaaaaaaaaaaaaaaaaaaaaaaagacacaataaaagtaaaattgtataatctctggaaaaaacaaaataggctgtcatgttctaatactcaatatgtaaggatgtttagtatattagtgggtataattattaataaaatattctatttagttatctttgaaccagtttgtaataaccaaaccacaaaaattcaatttgctttgtatgtaaaaatcttttaaaatagaaagtcctgccttaactttcataaatctgaatgtgagcatatatttatgcttttcatttctttgcacagctttttttttttttcctctaagacagagtctcactctgtcactcaggctggagtatagtggcacgatctgagctcactgcaacctctacctcccaggttcaagtgattcttgtccatcagcctcccaagtagctgggattacaggtgtgcaacaccatacctggttaatttttgtatttttagcagagacagggtttcgccatgttgtccaggctggtgcacagcattttgttgttgatgtgtgagacttgtaatataacagtaataatgctgtcatttcttaaagatgatatataatcctatcaaaatattcctgggaagtaggtatttgtcagcctgtcagtgttttccttttattttgtgtgtgtgtgtgtgtgtgtgtgtgtgtctgtgtgtgtgtgtgttttagtacattctcccagatgctgaaattttccctttaaactgttactatgatgtatgtcttatttctttctcttttttggtcctaattatgctctcaggagttaagacagtataaaattatgttttttaaaggaaacttcatcaaatacttggaaattagcaaatattttttagaggtagaaactgtcatttatattcctaagacttgtaggccattgtatttgttgactgactgatttgactgagaacctagtgtgtgataacgtgtcactgtttctgtcaacttatataattgagggtctttttaattgttcttaccttagaccactatatacttgtggtcttataaagtatatttgaaaattatatgcattttcatgttttgtctgggcctgggaaaaatatttattttaaaactgtaacatcttaacctttaaaacccattgtcagttatttggaaaaattagtattatatgatatgaagcacttctttttattgctgatttcaggtttcactatctgggaaactccggtgtggagacataggtctgttaactgtcttctttgttttatctggaatgttttattgatactataaaacaaaacttatcagtaagactgatttggaattcatattgtttgacagcattatcactgtcaataattatccattgtcagtatttgtaaagcagaataaaagaagccattatttaagtttaattcctgagatgattcagcatacggtgtaatatcaatctgtgggaattttattttaaactttttcttagtaaagtttactttttagagctgttttaggttcattcacagcaaaattgagcaaagatacagagatttcccataatcctcctgccctcacacatgaatagcctcccccattttcagcatcccccaccagagtggtacatttgatacaattgatgaaccaatattgacacatccaaataaaactattttttggggaggggagacggagtctctctctgttgcccaggctggagtgcagtggcgagatctcagctcactgcaacctctatctcccgggttcaagcaattctcttgtctcagcctcctgagtagctgggactacaggcacacgctaccatgaccggcaaatttttgtatttttagtagagacggggtttcaccatattggtcaggctggtttcaaactcctgacctcaagtgatccacccgcctcggcctcccaaagtgctgggattacaggcatgagacactgcgcccagccgataaaactcttagaacaagattaattgattgattgagacaaggccttgctctgtctcccaggctggagtgcagtgatgcaatcatagttcacagcagcctgcagctcctggcctcaagtgatcctcctgcctgagcctcttgagtagttgggactatagcttgtgctactgctcccagaagtctcttatttaatctgtctcttctaaagtatagatgtatagttcatacctttagaaatttctgagtttttatggtggttctgcaaataaacctgtttgcttcttatttctgccttcccttccttctgagcctttggtttttgattttctcttatatgctggttcagctatccttgtttctgttgctttaaagccttcaacatattatgaacattttccaccaaacatattgttcttatgagtacatcgtaattttagggcaagaagcagagatgaactttgctttaactcttttgtgttgaagtatgctaatggcaagcatgttttttaaatataaaagttgtacaagttgagatgtttaattcctttactttaagaaaaagcatcataattagaagggagaattgctgttatctggaaggtgttcagacagtttggggagaaaaaaacaaccaaaacagctgcagtgtaatttccataagggaatgggcttatatctttgtttatttgtgtttgttttccattgtacactcagtgcctagcacggggtaacacagtatgtgattaaccaacagttattggaaaaatatattttagtgtgttattttagataattaaaagtacatttaggaaatatgcaacctttttgtttggctttattaatcagctttaaaatgctgatgatagaagcaggaggcagagaaattataggcaaataggggtgggtccctggtgaaaccccacctccaaggtgaaaagcttgaaaccagcagcccaaagtgagaacttctattcctgtttgcctgcactgtcctgattggttctttctgaataatgtctttttaccaattgaatgttgccttttccaaagctacctatggcctgccccacccgcatcctgtgcctgtaaagccccggactcagtaggtagagaggagagattctgccagactttcgggaaaagagatggcttgacttcggggaagagactactgctgtacttcagggaagaccacctactcttcccgtcccctctccagctcccctctccactgagagccatttccaccgctcagtaaaattctccaccttcaccatccttcaagtgtctgcatcacttccttcttcttggatactggacaagaactcagaacccacggagtgcaggtacccaaaaaggctgtcatactggccctttgccctcgctggcggagggcagccaccccacgcaatgtggtaagggaccaactgagctgttaacatgcacacagacagacggcagagctaaaagaccactgtaacactttctctggggttttggggtcgtgggcaccctcacctgggtgctgctgtgggacctgcatggagctttctctcgctggctcctggagcagccggccaggtcctgcactctcttgctaacatgctccctcctgcagggggttgagcgctgtggcgtgagtaaactgtcgcccttgttgcaagtccaatgaagggaccaagaaaaatcctgcatcactgatatgaaatgtaccaaattaagtaacatcatcttatttcttctgattttgttttcagtttgtttatattcctttccataggtattatgtgtctgttttagttcataaaattgtggcctaatttatattttgaccattattcagcacactgttagtactcaggactaatttcagttgcttatttagacacatcgaaataaatcacattttaaggctgggcgcagtggctcctgcctgtaatcccagcactttgggaggttgaggccaggagttcgagaccagcctgggcaatatggtgaaatcccgtctctactaacaatacaaaagttagctgggcatggtggtgcacacttgtggtcccagctacttgggactctgaggcacggaaatcgcttgaacccaggagtcagaggttgcagtgagccatcacgccacactgcattccagcctgagtgagattacgtctcaaaaaaaattttttttaaacataaataaagaccacactatcttttttgaagattatgttcacatttcattctctccattgaactgtatagatgtattacctgtatataaagaatgtaaatttttttgtattaaaaatcgacaccttaaaaaaaaactaataccaccacaaggttaagctctgaggagatttcagctttacaataattacattgttacaataatgtttaacttctcaataattaaaaaccaaagcaatgttgcaaccttggttcaatattcaaatatatttttcttggtaaccaagctacttcactatttatagtactttataaatgatttagaattgttatgcagttttttcaaagaagtattcataaggtaaatttagaaaattattttaaaacgaaagtgatgcccaccagatggtgctatttcgcctgttttatctgcgacaataagtaggaaaaatgaatatagaacttcaaaaaagtgtatggaagatctagaatatttgggcattgtattttgggtgtagatgagctcagtggaaggaagcattcaaatattctaaacttgtgtttagtactgtatgtttatcttgataaaggtaaagatgaattcccagagttaatatgccagataaccttttatttagtctaaatgttaagtagattttttgaaaagttgacctatatgcaaattttattaacttcatagctgtatatgcatgaaaaatgaaattatttattagatatgtgttaccaaaatttgtttcaagatttctttatattgttaagtaaacaatattactatctcatttgagttacattgtgatttacaaattaagggaaacattttgatttttttatgtgtttgtaattattacccagaaacttaggcttgaattcactatttttacaaaggaaagagatgactcttctaaattaatttttgtattaggaagagggcaaactatgtggtacagtgttcacttagatgcagccattgaatgacgatccattagagtcaaaatggttagttagctaatgaaatacacttttcagtaaagctggaaagatttagccagctcttaaaagtgtttctaggattttaatgtagtctttttcccgctgattttattatcactctgtattcttctctggtcatgagattgaaccataaaagtcatgtagatgcttgttataagtatttgccaaagtcatcattgtcagtgattttattggcatgtgtgaaattagagattaaacttgcttttaaatcttgcatttgaatttttcttctggaagggtacatgtataactttcaatttaatgttcaattattggtaacagaatgaagcatctctctataggccagtaaatatatatagtagattttattgtattcctgtactgtttttgaatgaatattttactaattatattaacataatcctcatacatacccttaagattaggacctactataatgctttatttgaacttgtttcatagcatttgtcttttttaactttggattatagttttggaatataaatcagatccctcctacaaaaacataaagttcttcatgctttctctcattccacttatcacaatactttacatgtagtagatgaccctatatattttttatataaatgaatagttttgtcatgccaagtattgatattagtattagtgacaacaagtattcctcattccatagtttttgtttttgttttttttttttttgagacagagtcttactctgtcacccagggtggagtgcagtggcagaatttcagctcactgcaatgtctgcctcccaggttcaagcaattctcctgtgtcagccttcttagtagctgggattacaggcatgcaccatcacgcctggctaatttttgtaattttagtagagatggggtttcaccatattggtcaggctggtcttgaactcctgacctcaggtgatccactcacctcagcctcccaaagtgggattacaggcataagctactgcacctggtctctgttctacagttttttatcttatgcttttctgaaatgactttttatagttgggtttaaaaggatcatctcattggaatctcatatcacagttatgatgcattctgtcatgatgaggataagtgtatattcaggttaaaaaaaatcaaaatattattgtcagcctgcatcagtattagagattgtctggtccaggagttctcagattgtgattcaagggcctcttgtgggaggggggggtcaggggtccttaagaccttgacagaagttctgtgagggcagaactatattcaaagtaatactaagactgtgtttacccttttcattctcattctctcatgagcataggtggagttttctagaggttgcataccatgccatactgattgaatgtacaagttatatgaaactctagcagttctgtcaaaagacaaagttacaacaaatttagtttaaagatctcagtcagctttattgtgattctagaatcaggcaatacttcattccataaagtagagtgtgtgttctaatgagttgagcagatggttggttttatagacagaaagggctgaagaaagcagattggtcatttcaaagtgaattctcttgtaaggtctggatggggagacaggacaatagaaagactggttaatatcaggttacttcagattagggattaaaacagaggaaacttcattatcatgcccattgaatacttcattatcatgtgcattgaatattgaaaattgtcctgtttgggatattaggctgttatctgtctctcctgattttttagaaagtcaagataacaactcagtttgggtttggtgagcatgggtgactccattttgatttttagtctggtcttcttttggagcctagtgtaggagttttgttcaaaacagtggcctataattttggcttcataagccagacattaaagagatttgcaaagattataaaacagtgcttctcttgtcactaagatgttttttagtttggaaatagttattttcataaaatgttacattaacatttaatgaatttattcttaaaataataaatatttaaaaaagttatattttaacttctaatatgataactagggctagatattaaagctccttgaattactcgatactctttttaaagtgtaaagtggtcctgagatgaaagtgtctgagaacttatgatcctaattctttatcctcatttcatagatgagaatactatgagcccagagaggttagtttagttaagtacactcatccagtttttggcttagctgattcttggatcactgacatctggctttttttgatttttttttttttaagttttttttttttttttttttttttgagacagagtcttgctgtgtcagctaggctcgggggctggagtgcagtggtgcagtcatggctcactgcagccttcactgcctgggctcaagtgatcctcccacctcagcctcctgagtacctgggactacaggcacgtgccaccatgcctggctaatttttgtgttttttgtagagaagggtattttttgttgcccaggctggtctcaaactcttgggcttaagtgatcagctagccttgacctcccaaaatgttgggatgagccaccttgcctggcctgatatattttattagcagttttgctgtttagatattcttcaacctaataccaaccatcagctcctttaacagtttcttcatttgatattttaactaactttattaagtacatgagtaaattaggaatattgacctactttttcaacaacaataaaatggtgtttttttaaactcaaaaaatgtctagaaaaagggaattgatatatgaaacagtgtaaccttagcgtcagaaagaataatgttgagggcaaagaaataggttcttgtgttttagagactcttttactgtcttttttcctttttttccccccttcttcaacaacaaaacattggttacaagcttccctgggcatttatggcagcccacctacagaagaacaagtgttctgttttaaaattttaaaaattttatcaagaggataataattacacatatgctgcttttttgatggatatgtattatttctcaggttgagcctcatggtgggggtggtagattctaaccccctccttttaattgttgaatgaatttaaaactatgtcataaagaaactgcgtaattttaattcaaagaaagataattaggatatacataatatccctcttcctttgaggggcttccttcgtgtagaagacatggactgagtgatttttgctcaataaaggaaaactttctagtagtaaagaaatacaaaaatagaatcagcttgtttggaagtagtgagttccctttcttatgaggcattaaagcatagaccagattattgactgttagtaggagtactagcaaatgaatcagtagatggagggttaattgggttacatgacctttcagattgcttttttttttgaggtggagtctcgcttgtcaccaggctagagtgcagtggtgcaatctcagctcactgccacctccgcctcctgggttcaagcgattctcatgcctttgcctcccgagtagctgggattacaggcacgtgccaccacacctaattttttgtatttttagtagagacggggtttcatcatgttggccagggtggtcttgatctactgacctcatgatttgcctgccttggcctcccaaagtgctgggactacaggcatgatccaccgtgcccagccttcaaattcttttattaagtgtttgagtatacttgttcaaaataactttttaaacaagtataaaaaggcagttggtttagcagatgtattctacttttatatcagctgctctgttaacctaaagattttatggatctgtggtctcaccatgatcactgacatcaattctccttgaaggaggatgagttttgtttgttcattttattgcaaaccatttgaagagatgatagattggtagcagaaatttggcagagaaaaggatgataaacattagaaaggaggataaagcccactggaagacataaatgaattgatgatattttggtgtatattttctcattgctttatgattataaatattttctgctgctttttgccactatctatttttcatgtcttccaataaagtattccatggccaaaatttgtgtgaaattctcttcggttgttgctggttttacaagttatagggttctttggaatataattactgaaatgatgactacactaaaacatatttcttcttaatttaacaaagtatttagtgggaggaaggctctagcttttcttattttctttaatgttttttaggcatgctagaggaaaatagtgttcttactattagttttgaacattttttatgactatagagttgaaagcccaaaacactagaagtaaatggatcattgcaaaatatttgttttgttttcatttgtgagtggggcattcgtgtgtcactgtgtctatgcttctatttttctctgtatatagtttatatccttaagactttcagaaagaaattgagatgttatgttgttttattgtatatgcatgtacatgcatacacacacacacacacacacacacacacacagttttatttgttcatcatatatttaaggcctgacataggtcttacaaagttcaattactatagggcttaagtaggaaatgaatggtaaaatgagccaatttgaagcaataaatactgattgatagattatcaccttcttccaaataagatatgtggcatcgtagaatcttgctcttagatacacagatatgtgtgatgtttaaatagttgagaaattcaaccagaaatgaatgaaagggttttcccgttatcctgtcatacgcaaattaccagatcattcagttcttcaatttatcaattcatgtatttattcatttaactaatatttgttagttttatactatgtgtaaagccctattttagacactgaatacagtgccagacagtaattttcctgcactcatagtttatactctaatagagaatgtagaattgagctttaaatttcctattcaataagtatttttagtaatatgtgaagtacaagagcttctgaagacttattgcgccactctctccctattcatccatttaccagttgttactgaatgcttactctatgtactagaaatgcagagatgagtaagatacaacctggccctgaaaaaaattcagtctatttggagttatagacaggcagtaactagctattatatagtgtgatgatggctatgatataattacaaataatattctgcaagaacagtaattttctctagctgtgaggtatgcaagaagctatcatagagaactaatatttgaggatgagtagaaatagtcgggtatagggagatcaaaggagaagttactcctattccccaaatagagggttcttcatgaacacacagaagtaggcaaggtctgtttggagaatggtgagatattgtgtagtttgggtaaaacactgggtatgtcatggagggagaggtaaaagaagaagctacaacgtaggttcaggccgaattgtgaaaagttttatatacaaggttaaagttggctttttattttacagttagttggggacctgtggaagatttttcagcaggcaaacatacttagtctgcagtttacaaagatagttgatagaatacaggatgaagtagtgagaagttgaggctatggaaaggcaggtataccagtttgaaaacttcataatagatatgaatgaaataatgagggtctcttatagggtagtagtagtagtgactttagaacacagggatggattaaaaatcaaattcagaggtatttttgttttgcttcatttttttgagacagggtcttgctctgtcacccatgctggagtgcagtgacatgatcacagctcactgcagctagggctacagatgtgtgccaccatggctggccaattttttatttttatttttatttttggtagagacaaggtctcattatgttgcccaggctggtcttaaaatcctgagctcaagcgattcttccatctcagtctcccaaattgctaggattacaagcatgagccaccatgcctggtccagagttagaactgacaggatttagtgagtgatccatatggagagagggcgttgaaaaagattttgaagttttgtgtttagtgtctgcataattaaatgctggtactattaacttcaaaaggaaaagcaatatggttgagggaagcaatgaatttggttttgtaatattgagggcaggagtaaacctaagggaatgttggaggcatttaaattctaagtggaggagatgcctattcaagagaaaggaggaggagtagggggaagagatagctgttcagtgtgtcattaaacctctcaaatcctcagtttgttatttatcatatattggaggtagaatcaataatttttctggttttgaaataacctgtgttttagttatcacaaattctaaattagtagtacaaaaattataataattatagtttatatgttatagactgatgataatatttattgattacttcctgtgaagtttaggtaaaatgctaagcattttgcattcatcatccatttaattctcctagcaatatgagttaaatattattactatctggattttcagaaaagggaagataacttgaccaagattgttacagcaaataagtggtggatgggtattcaaacccaggacaatctgacattaaaactcaagcttttaaccactatattatttgcctgtcttgtagaacataagagttgtaatgaatctaaaacatcatctagccctttcctgtaatcagatttatgtcatagctaaggtctgtaattaatgtcaaaattagctatccaatttacttaataagaagcttactccacagccattcattactgctgttttccttgtggcagatacttttttttttttttttttttttgtcgactcacctctttaccgtgtgatgtgagtaaattctgtatagtctaggccactcatgattatcccatttttcttgctagtcattaattaagacctgaacataggactgatatctgaccaataactcatttgtggccaatgagacatgaggggaggtttggtggaggggcttcttggaaaggtaacacctcctctcccctcatttttggatgtttctatctagatgggttcttggaattgtgagagctatcttggaattatttggggcctaggtcaggataaaaccaaaacactggatggcacagtgaaaagatggtgagaacttggatccttaatgatcttgttgaacttctaaattacccattcctaaagctattgtgcctcaggactaggtcttacatgaaattagagggaatttattaggctgtgtgaaacaaggactttttaaggctactaacagtttttttcttttaaacgatacttatcactgaaagaaacctaactgggatctgcagtgtttatctttgtctgaagtaaatagaaaggcactgtagggcttgcattactgttgagacacaattaaaacaggaatagaagacaatttttgtgtcactgcacctaatttaattggtgtagaagttggagatgatcatgctctagaaaacagatcttatatatgttaaaggtagcaaagtgtcattgaggaaatgagtctgattattctgacagtttctgtaggtaaaaggaatagaaagtaagtgttcagattaggttaggaaatagaaatggatttagtttgtagacagttaacctacgtttcagggtccttccaagactctggaagaatctcaagcaatgtgttaacataatattttgggtgaggcggggtaagatttgcaaaagttaggtatttaatccattaaaactgctattccttttcacttagactttccctgtatcataccctcatattgggtggcattagagtggcctgagctaagggaaaattgagtagaggatacatttagagatagtatatggttagcagttgtttatgtgtccagttattttgtaggcattacttccaggaatgttattactgtccactgtgtctacttccctggccttgtgatacatagatgtagttttgcagggcaggtgagccccaaagtggggctcagcccgtgagggttcttggctttgcccagaaaagaattcaagggcaagccagaggtagaagaaaatagatttattgaacaggcagtgttacagctctggtggtgttatagctcggtgactgctcctgcagagcagggctaccccgtaggcagagagtagcagttcagggcagttattaatacccttttttaataacatgcagattaaggagtggtttatgcagaaatttctagggaagggatagtaacttttgggtcattgggtcattgccatggaaagtggtggtaactcctgggtgttctcatagcagtgttgacatggcacactggtgggtgtgtctgatggaaagcttcttctgcctaatcatctttcagctagtcctcaatttaattgggtgtctgaacctgtctctagagtcaagtcctgcctcctaactcagtaggggcaagggtcttagagcattataaatatgttctttgtggtagaggtagaggaagagaaacatcgtttaagtgtttagagtgagaaactagtctggaaaatttttctaaatcttggaacttgattgtggttttcgtaaatttgataatattcctaagaatgtatatgacattatcagtaataagttataaagaagttataaagctgatataaactctctacactgcctttttttttttttttttttaagatggagtctcctctgtcacccaggctggagtgcaggggtgtgatctctgctcactgcaacctctgcctcccaggttcaggtgattcttttgcctcagcctcctgagcagctgagactacaggcacgcaccatcatgcctaacaaatttttgtatttttagtagagatggggtttcaccatgttggccgggctggtcacgaactgctgacctcaagtgatccgcccgcctcagcctcccaaagtgctgggattacaggtgtgagacaccgtgcctggcctacactgtcagtactaaaaattgatcaaacacagtagtaaaaagataaaattatctttctattctcttaatgttgcaaaattgttatatgaagaggaaatcaagaaatgcagccagaaatgtaagaaaataagagcattatagagatagattaggcaattaataaagatatgctcttctttttgaaattcatgtttttggcatttgttagccttttaaagttagtgtttagttgtaatttattttctcattccagatatttacttcacacctaattttgtattcctttccttaaatagagtcccacaaattgtaaaaaaggaattagctcaccaaaaacaccaaatgcagtatttttaatatttacctttcaggttcggttgctggatctagatatgcctcttttttttatttcctcattttttcttctaaaaagaaaattatgtattttaatgtcagattgcttttgattaaaatgtttcatattaaaattgtatacctgaaaaatattattcaataacacacttcaaaaagttgacagttaaaaaaaaaagaatagcccttgttacttttcttatctaatcacagagtttgtgtagtgaatgtaaaaagaaaaaaaaattgttacaagtttggagcaaagagctctgtgtttaaaaggaatctccttctttttttgtgtgtttttccttttgtaccaatggggaacctaaatctgttttagttgcacagacacaatggacaaatagtcattttgtatttgccaagtgtgataccttcctttgtttatttgctattaaactgttgagagttttatggctagtggataatcattgttcaaactttttaataactacagtgaattgtgttaatataaaattatgctgtacagtattttcttgttatgttgatggtcaaagtgaacatcagatattaaaaatttagatgagtaaaatattaaacagcctatttttgtcatgtaacaaaagaccatgagatccatggaggaaaaaaggacagctttatttttctatagaaaacaatagtaggttggggatatgcagcctgtggtgtaaaatgaaaatgaggtcctagttgggggttggagagttagaaattataaaggcaaaaattgtaggacaggggaggtggggtcaaggaagtaaggaataaagtcttgattagatgacctttaatccccaaatcaccagtgtgtcttagttggttgtttccaggtggttggtcagttggcaccaggtggtcttttggtgatcatttggggaatttccaaatgatcaccaaaaggaactgttctttgacttggtggcagaaaaacaggttttgcaacacttttaaggacacagggtataattgctcccttaccctgtcattgcctcttggttctgcttttacctttgagccacaaggagtctatcttgtcaattaactgggggcataatttgacagtccaatatgtataatgatgacaacagctccactaacatgaatgccattcttagaatttctcatagatcctggcatttggtacatctgagttgaataaataaaagtctggggaatgaatgaaagaaaaattagttcaatgtcctataactttaagttaatttattagaattgccaccaacaaaattagctctagcatttagatactaaaaggaatttgttaagcaaacttacttttgcagttatctctccatggacagtcagaacaggtattcttcatttctaaaacatactgctgttctttaagaccattctttggcactgtggaactttagtcattttctagacatttgttagccactaaatgtctcataccagggactcatatttgtaaataatagtgtctgcctttgagaagctcataactgggtagtcaacgaacagtcacagtgcagatctggaatcagtgttgagggagtacaaaatcctttgggtgttgtaatcagagtcaagaaaagcttcacagtggcgataggcttaagcttagttgaaggaagaggaagctttcaagtggaggtggcagagaaagcattctgacatgtgaaaaggcaggaaagcctgcgtgcagcatatttattagttttgtctcccttggagcattttgtaaattttattgagtattcagagttgacagaaaggcagtcagggatcatttcatggagcgccatgctgagaagattagaggattttaagcaagtgatgtggtcaaatttgcagttttgaaagagtacttaacattatcctggttatatgtttagcagatttggcaagaactgattgttatgatttgatagtcatttaatacaaaaaggaacctggaatgctcttcgtctttagtgaacattatgtaacctatcttcatggccttcttagtgaggtaaacattttttttttgaaattgtaaagatttaaactttttgaagggtaaactttctcagataattatgcttagttgtgagcagaagtaaaataatgtttttacaggccagagcatttaattaccagtgcaagactgtccagactactctttccatttaccatgataactggtaaaatgtgagatggtgattgctccatcatcttgggtactgagatgaaaagatgtggggtggagtcctcaaatgacttatgatgaacagctagtgtaagcaagaaaatgaccttattgttttaagccactgatattttgcagttcttacctgataaatggtacatgaacctaacgtgtttttattgatgcaaccatatatcaaaacagtatttttgaaggaatcattgtagaagtacagacatttatagaaaattttttacctctctgatttagagaaatttttgaaagcacaataacttaggtaacatagtaacataaaagttctcataatatgtgtaaaccaaaatgagttactgcaactaagagtcattttgaaagagactaaaattgacttatctttaatttgttaaataaaagtgtgatattaaatccattacaaaaatgggtaaaaattgaagacaactgcaattttataggttactgaactttatattttacatgatattacagtcatccttcagtatacatgggcgggtggttccaggacccaagtctacaaatatgttaagtcccacagtgggtgctgtgaaacctacataaaggaaaagttggctctctgtatgcgcaagtttcgtatcctgtgaattctgtattttcaatccacatttggttgaaaaatttcagcctgtaggtggacttgcgcagttcaaacccacttcattcaagggtcaactgtattttatagtcagtatttgcataataaggaaatctaaatggtactttgatattcaaagtttcataataatctatatgtatgttttaaagtgagtgtggtgatattaatacttaaatgaaaaatatgagttaataaagcaatttataattttatatcaattgagcatattgtttttgaaatttaatttagaataatcatctatacataatctatagatactttagtctttctatatgacattcttatggtggtttattgattatcataactatgaataatgagtaaaaattatacaactatacaagccaatatatgcttgaaattattatttattgatagtaaattagattttgacatgaaatgatttctgtttaggcaataaatttaaactatagaaaaaaatgcagtgtaacttgtactgtaaataaacgattagcaatgaacattacagtgagagctgatagtttatgaattattcactgcaaacttattgtctctgtgtcattaacatgtaagataatgagcctaattaccatggctttaaactcaggggagttagcaatttatgtgtaaaagtttctgggctgtagttaccacccacaagggtattgagagaactgcagacactacttctgtgttttgtttcagaaatgttctttttcctcacttgcttccttcttaataaattagtttttatttatttttatagtgagaattatgagcttttcctcttgcttgaatacctttttaaaggagttatgagaaatatttaagtatttttttagtgtagtttagtgttgtaagtagacaaaatattattagatgtattcttttatttgcttacataagttggcatcacttactatagtaaatgaccactaatagtgtaatttcttggaaaatctagcctaaaaggtcaatattaataattggttttctcctctaaaaggatttgtactaagatgatttactttcaaagtactcagtattagcctatagccttttttctaatctttaatattgtatctttgatcttaatttaaagttttgatgaacttgttgcttctattttctctcttatagtataaattatctgtaataagccaccttaattaaagttggtaaatctacaactgcttcaattatacactaatcaattatacactaatttaattctacttagcaggatacggtacatcattaatcagttttagacttaatacaacagatttagaagtaatcaaaattgaagcattttatttagctgggaaaaaaatgaagggtcataatctagtaattcacatatcaattctgataaaaatcaaagattctttgctaaaaatgaaggaatgtagctgttatgtttactgttgagtgccatgggctgaagctgtgattatataatatctttagatgttaatagcataatagttttgtgctctacctttttctttaaattgttattcatgttactaaatgggttgttttctgtaacatgattgtttaacgtatacataatataagaattccttgagtgaatatcttttttgttgttgttgtttgtttttgtgttttttttttttttttttttttgagacggagtctccctgtgtcgcccaggctggagtgcagtggcatgatctcggctcattgcaacctctccatcctgggttcaagcgattctcgtgccttagcctcccaagtagctgggattacaggcatgtggcctagctaatttttgtatttttagtagagaagaggtttcgccatgttggccaggctgatttcgaactcctggcctcaagtgatctgcctgcctcagcctcccaaagtgttgggattacaggtgtgagccactgtgcctggcatatagaatatttactagtagtttgttttgaacatgtaagcatgtgcacaaatgtatttttttcagaattatgttaaataagatgattagatataattaactcaaaaatctttagcaaaatgatctttgttttctgtgattgaggtggtgacaaatttgccttagaattcttggggatgtgttataaactcgatgtaatcatttttcttttccttttttttttttttttttgagacggagtcttgctctgtcacccaggctggagtgcagtggcgcgatctcggctcaccgcaagctccacctcctgggttcatgccattctcctgcctcagcctcccaagtagctgggactacaggcacccgccaccatgcctggctattttttttgtatttttagtagagacggggtttcaccatgttagccaggatggtctcgatctcctgacctcgtgatccgtctgccttcgcctcccaaagtgctaggattacaggcgtgagccaccctgcccggcccatttttctcaattatctgctcattgaattaaatgactcagattgaatttcattactcattctttctatacatgttcatattattggaaacacttcttgtcctgctcagctttctttccaataaattagtaattctttgctcactcgtcttgtattcctttataagaatgttctagatagggatattctaagttttgaagactatgtatgttaagtgcattttacccttttgagagagttttagtaacaagtttcagggaacccctaggactctgacccattatagctttggccatttaaaaaaaaaaaccttcaaaggtaatatgtgtacatggttaacaatcaaatagaacagatggtctgtctaataatgaaaaacaagaaaaatcttgccctatgtttctctgttcccactccccccaaaatcagccacttgtaactgattctgttttcagtgcttattgtggttgtctcaacctgtagtagaattatagattcttttgtttgtttgtttgttttgctttttaaattagagacaagttcttgccctctcaccaggttggagtacattggtgtgatcacagctcactgaagccttgaactcctgggctcaagccatcctcctgcctcagcttcctgtgcagctgggactacaggcatgcaccactccacccagctaattttttaatttttttgtagaaacagggttttgctgtgttgtcccttgaatgcctggcctcaagtgatcctcctgccttggcctgtgattataggcgtgagccactgtgcccagccttagaaattatttctcaatgcttttgctcttctgtgttctgtgattaggtgactctttatctcacaccacttctaccttttctccatccttccaagttgtgatcactgttttcgttcctaaattggttatttttaaacttcaaataattcaggtaaatttatattttatgttttgttaactgtgttccctgcttactgtttcttccattaatttaaatatcatcgaagttgataatgctaagaacttgtttgtgttaaggtaattctcacatgtggataaaaactgattagtgccaaaagtttacaataaaatataacagtctcctatcctaccctgggttctccagaagcggcaacttataatactgttagtttgttctttctgatactagcttattcctaaataatatgtgtattcagcttttctgattaaccaattttagatgttatctattgacctttttattggggcctgggatacagatcatattatatacctgtgcacccagttctgaaaagttatataataattttggttcaatctataagcagtctataatcgttatttatattatagtgactatgtaagtattgagtgctgtaatatagcacattacattcatttgcttaaacaaatatttggtccccctttcccaccacattatttatagccttgtttattcatttgcttggtttcctattggctaatttgctaatctcccccctcagtgtttcagcagatctctccagcacctcccattaatttttctttgtttatcataggttcgaaactcaataattttttttcctggaagtttctctccttcagccctctattctactttaccaaggagttgtcttactcttttcagctctgatcctgggacttccctttgttgctcttttgggggacaatttgctttttgattgtttttagtcttattagtttatgcccttgttttgctcaagcacattctccagagcttcctgagaaaagaatatgtgagaaataaaatttttccatacatgtaggtctaaaatgtctttattctacctttacataggttggtatttcaattaagtctggaaatgcagattgaaaataattattcctcagaaacttgaaggccttgctccattagcaaccagtgtttcctatgtgaagtttgatgccacactgattgctgattctttatatgtgacctatttttttctctttggacattcttagaatctcctctttcctcctggtattctggcatttctcaatgtgatttttcttattatggcttttttttttcattgttctgagcatgtaatgggcccttatagtccagagacttaaatgttcttcctgccattcatgcaggtttttgaaatttcttctctactattttctttagagctatgagttatttttattagccagttttctattaatagacactggatttttcaagttttccaccacaaaaaacactcatgggccgggtgtggtggctcacacctgtaatcccagtgctttgggaggccgaggtgtgtggatcacctgaggtcaggagttcaagaccagcctggccaacatggcgaaaccctgtgtctactaaaagtacaaaaattagctgggtatggtggcaggtgcctgtaaatcccagccacgtgggaggctcaggcaggagaatcgcttgaacctgggaggcagaggttgctgtgatcacgccattgcactccagcctggatgacaagagtgagacttcatctcaaaaaaaaaaaaaaaaacaaaaaaactcctcacatatattatcttttttgcatgtacttttatataattgtgccagttcttctgtaagatatacatggcttttatcttattactttctctgagaggtagagggtggggcagggaaggcaaggagaggaagaagctttgagattctcctacctgaacttcagattctggtgtgatacctcaatattgagttagaatggctttatcaagcatgtttatttctagtttttcatattatttttgtcttagtcatgaagcacaacaaaccaacatagaacccatttcatactgatgaataaacaggtagcttcattcatgtattcatttattcattcagtcatgttgtgatactctttgggaatacaaaggtgatactgtacttgctgtcatgggatttacaattctagggataagtaggagtgtaattgataaaacatgtatttgtgcttttcaatagtaatattgactaactcaagaaaacttttggagacaggctttctttgaatggactgtgatgcttgcttgtttatgttttcatgaatacatttactagcttttgattttttatattaggagagaacagagtgtcttgttgtggcagaaatacctaatatgtaatcctctgaattcttcaattgttgcaaaacataaacatttactaaagagttcagcagagtagattaaatgttatttaaaacatatgttatattgacctcatggctaaatggcctggtttaggaatccatgaattatcccacaggtaatagcaaagttttctccctgcctcgtctcccaccccaaatatttgatttccacatatactgcacaggggaattgaatttgatgtcgaaagccataagaaaaagagaaactttgctttttactgcttttactaggaaatagaaaacatttttagtgacaggctatgcttcatcatgaaaatacggttgggtgttttaggccttcacaaatttgatttcattgtacttagtgatggatgttagtaagctgtgtgagatggagagaaattaaagaataaacaggaacctctcaaacttgctagtgatgttctacagtttgtagcatgaattttcttacttttagtttttccttatgaaatactttatgtagaacaaactagcagtactaaaacaaacacccatgtacccaatctgtcaacacttagatttgttgaagatttgggtgggcagagtcttccacccaaatggtaaaaggggaatacattacaagtacatctggggttctctgtatacctgtcttcagcccattttctgtcttatttcaaagttcactggtgttccagttttgtttttagctgtaatgcttttcttagtgcttaaaatatatgtgtatatattcataagcaatatgaagtattgatttgcgtgttctaaaacatattttacagtgcctctccttcggctcgctttttcgtgtaacattgaatttttagatttttccctgttaatgcacgtaatttatatgtaatttattttcacctgtatagacttgtatgaatacatcacaatttattctttggttgaggaattacaggtttttcagtattagaaacactactgtgtttaaggttcttgtactgatctgtttatgcatatgtgaaagattcttgaggactgtattttaaatatgtggatgtttaaatttcaattaattaaaattaactcagttcctcagttacactagcaacatttaaagtgtttaatagccacatgtaactagtgagtaatgtattggatattgtggatatggaatcattccattatcataaaaagttttataggctagtgctccttggggtttatacctgtgtgtggaattgttgtgtcactgggcttgcacatgttgcacttcagtagatgttgctgagttgttctttccagtggtatctgagcattccctttctcaattgtcttgctaagaattggtataaacagaaattctaatttctgttttgtaggtgtgaactgtatctcattgtggttttaattgaattttgaaaatatatagtgaggctgagccttttttcttatacatgtgtttaccttttacagttctcatcttgtgattgcctcttaatgtcctttactcattttttcttttgagatattttaaattactgatttgcatgagttttttttgtattttatggatacaaattctttgattatatttgccatatatctgtgcctagtatgtgacttgtctttcattttgtggtgtcttttgcctcacacaagttttaaaatgaaatgtaatcacattatcaatttttaaaaatgctttatcttcttatgccttatttaagaaattacttcctactctaaggtcagagtttcccatatgtgctttgcagaggtagatctttcatctggtagtatgtaatttttgtgtatggtgtgaggtagagttggagacttgagtttttttgcatatggataaccaattatctttgtataattttctgaaaacttcattgccttaatagttttttgtttgcatgggggtcaatttctgggttctaattctgttccattggtctatttgtccctataccaatgtttcagttgaattttcctttttgtcaaagtacctatttttttctttattttttgtagagacagggtcttgctttgttgggtagactggtcttgaacatcaaatgattctcctgccttggctttccaaagtgctgggattacagttgtgagcaaccacacctggccaaattttcttaaaatgaaaataacagtgataatttaggtccaagccctcttcccaaaattgatttagctgatgataagctataatattggaatttataatataaaatactacaatttttttttttttttgagacggagtcttgctctgtcaccaggctggagtgcagtggtacaatctcagctcactgcaacctctgcttcctgggttcaagcgattcccctgcttcagcctcctgagtagctaggactacaggtgcgcaccaccacgcccagctaattgtttttattttagtagagacggggtttcaccatgttggccaagatggtctcaatctcctgacctcgtgatccacctgccttggcctccaaaagtgctggctgagattacaggcgtgagccaccgtgcctggcctagaaaatgatattataaccagcagatgtgaacaataacatttttttctgtgatgatatttgagaaaagcgcaacttaattacaaaagagtgaaaaacaatcactttatcaaagtcagaacttctatacactttcaagtggtgaattgagcctcacttaaaatctaattttcacttttaatgccatttgttttcttttgagatataactgattcatttaccaccaatttttataaattggatttgtagtttggccattgtatgaaaatatttttttaaaaaagtatatgggtcatatgggtagtaatcaggcaaattggttttagatttgcagtacctgttcaattatctgagatttaggggatctagggcatgtgagtagaggttctattaggtttataaagtgcttgtgatgataatataggttaaggaccaagtacctgggaaagatcaagggcatactaaatagttgttcctaaagtaatgggacaattgcagagagagggatgagagaaggagacttaaggatgatgtgttgatgtgtatgtatatataaatgagacataaatgacttttggaaggattactaaagaaaaacagcaatagaagaagactagcctatgtccagcagcaaaaggaagtagaagacagtgagtcagatagtgaccagtacaggacgctaggtggtgccattagtcttagactgcttatttgaagtctctggaggctcagtaacctcagaatagaaagatcgaaaggcggccgggcacagtggctcacgcctgtaatctcagcaccttgggaggccgaggtgggtggatcacgaggtcagcaattcaagaccagcccggccaacatgatgaaaccccgtctctactaaaaatacaaaaattagcctggcgtggtggcgggcacctgtaatcccagctactcaggaggctgaggcagagaattgcttgaaccggggaaggagaggttgctgtgatcggagatcgcgccactgcactccagcctgggtgacagagcaggactctgcttcaaaaaaaagaaaaaaagaagaaaaaaaaaggcactgcttgtatagtaaatgagcgaattgtcttattgagtataacccatagtatattatagttcttgatattttcttctccagtgatcattttgaaaaattttctggaatttgcattgtaaagaagtttgtccaccaaataaactgtgttttaaaagtaatagttcatttctttctaattttaaaggttgtatataaaaaggtattttcatttaaaattcatattaaaaaagataattgaaattttcatattgaaattatataatcagaaggaacttggtgttttaataagctttagtggccttttcctaggtcaatgtacaattccactgaatttttttgaaatacatatccatgggttccacattggtggattaaaccgtggaaagaaaatattagggaaaaagaaattgcctgtgtacagagcatgtacacatttttccttgtcaatattccctaaacaatatgacaaaagtttacatacatttccattgtattagatattgttagtaatctagagatgatttaaagtttggggaggatgtatgcaggttatatgcaaatacagttgaccctcaaacagcacaggtttgaactgcatgcacctacttatattagtttttttccagtaaatacagttggccctctatatgggttggtttggcatctacaagcaaaaatggatggaaaatacagtattcaaggaatgtgaaagttgtgtatatggagagaagggccaactttttggatctatgggttcaacagggccaactgtggtactttagtatgtgtgcattttggtatccaagttgggtcctggatccctcaaagatactgaggaatgactgtattgaagatgattccttgattcctgttacatttttttttaagattccagattgggaataattaagtgcattatttgatttctggagatgagttacaccattaaatttttgttgatatgtgtatcgtgcaggtgacagaaaccctaactcatactggcttaagtaaatggaaattattggatcacatatctaaaaagatgttggtatggctgattttaggtgaagcttgatgcagaggttcaaataattttatttggaccctcttcacctcatcttctagaggtagggtactgccatcagctattggcttatatccttatttgtgtgtgtgtgtgtgtgtgtgtgtgtgtgtgtgtgtgtctgtctgtctgttttagtggctctaaaaacaggtgtaggattatgtcatattaggcctctttggcttgtttgggttccatatctactctgcaactggagatagagttaacactgctggaaatttatggattaagagtgttgaagggatgattccccaaagaaaatttggatcttattagggaaataaagaatggttgtaaaattgcacttatttctttaaggaagtcatcttaaagctgtttttctttgccaggtatggtggctcacacctgtaatcccagcactttgggaggctgtggtgggaggttcacttgaagccaggagtttgagaccgctctgggcagcataatgagatcccatttctacaaaatatttaaaagttagccagagatagtggcatgaacctgtagttctagctacccaggagactgaggcaggaggattgcttgagcccaggagttcgaggctgcagctcgattgcgccactgcactccagcctaagcaacagagcaagtcaccatatctttaagaaacagcaacaccccccaacacatgaaaaacttttttttttttttggctaagctgttcttacactattgattttatttcactagaatttgtttttactttaatctcatttgtgctacttattagttgtgtgacttctcagagtccatttcctcactggcaaaattgttgatacaactattgatatagttatggtgatgataaaataagataatgtgtgtgaaatacctagcctagtgcctggcatatattagatattacagaaatgttagtccacttgtaagcatggttattacccagacatgtttggattttatcagtctttgctatatgttttaaattagcctataatctgtaagtatcacagatgttgtagaatgatcaattttcagattatcagtttgatttattgattaccgctttcagtgctgaaaatgacagttggtagatattgtccaattcatgacttgccagtatttttatcctagtacttaatgtgcagatttagcttctgtaagatttttacaattaatctatgtggggaaatataaattatctttaaggagtagcagtaagtgtagtgaaattatgataaatggttttattgtttggggaaataatatcaactgcttcatgtgtttgaagaataaaaggaagttggcagcaagggagaaagatgaatgattaagtatggcttaaacttgttttttaattaaagtgcttcattgttgtacacaatattcaaattatatttaaatgtaacattaatttttctattaacattcatctttattagaaaatattgcttgtatttatcataatttttttccccaccaactataacactcttataatctatttgggttaatgcgtgtgtagtctcaagaaaagagcctccttaattgtttttaaactgtttgaacactagagatttagtaacctacatttccaataactaacaatacatatgaaactcttgatagtgatggaatagaactaatcatttccttataatatagtgatacatcattatttgacttatggcatatttaactctggttagctacaagcagctttatactggtgtcttttattcagatttgagaagtatcagtgtaacatataaagaacttatttttactaattttcaccatattttatagacacaaaccacatgagaccaaaaatagtgtatactgacctggctggtcattttatggttggttattgtgtttattattctgtactatgtttgttgtatttgtgctttagttgctatttatttttaagaatattgtgttatataggtgtaaaagtgataagaatgtgccaggtatggtggctcactgtaatcccagcactttgggaggccaaggcaggcagatcacttgagctcaggagttcaagtatatcttttgtaatcccagcactttgggaggctaaggcaggtggatcacttgagctcaggagttcaagaccagcctggccaacatggggaaaccctgtgtctactaaaaatacaaaaaattagctgggcgtggtggcacgtgccagtagtcccagctactcgggaggctgaggcaggagaatcgcttgaacccaggaggtggaaattgcagtgagccaaggtcatgccactccactccagcctgggcaacacagccagacttcatttcaaaaaaataaataaataaataaaagtgataagaatgtgacatgttaatagggagagatattagtccgatggtaattaaaagcagagaaagttttaaataaactaaatggtgaagaattggtttgttcaacaataggagttattttgaagaataaagcaagtgattaaacatgtgaaaagtaatgtgcctatgccccaaagtgctattgcttagtgggttatatctattgataattacaatattagaaattaaaatggaaacggttgaaaatattcaatacatttaaagataactgtaataaacccagtatttgctagcataaacacatttttctggaaaataatgatattttctaaaccagaaaaaaatagttaaaagaatggtattgctttttgcaaatctctttaatgtctgacttagtagaagacagctggattttcatctgcttctgcctgccatctgttgtaatatattgaactgatccagaactcctggtctcaagccattgttccacctcggcctcccaaagagctaggattacaggtgtgagccactgcacccagcaaagcaaatagttttaaccttgttggttccctgaaaagattttgtgggacccttgtagtccttagactatgctttgagaactgctggccttagcaattgaacgtaagtacagtaggagacattggtagaaatgcttttgaatttacagtagagtctgggcatcaatattagatgtctattgatcttttattaaaagactaagagtttgagaatttaaaggctaaaacattataggtcctgctgatcagacttttcatagccagatagttctgtaggcttaaggccctttaaatccagataatgtccaagtaagtggcaaggcagcaatttggattccatagctgctaaaaagttttttacggcatttgtacatagatcattaagaagagaggaattatttctcacaaccaatttttagtgtagacaaaactggaatattttggagaaaaatgtcttaatagaatgcatatagcggtaatgtagtcttctatttggcaggaatatatatagggatggtcactttagattaaagaacaaataaaacttaacctacttataaacagaggcttctgtattgagaatttttcttagtataacatatattcaccttagtatcaagttgtgggggtttttgatacccccaaattgacagttattcagctgaaacttggagataggacagaccttgattaatatttggcaataattgtcagttctaatgttggaatttttgctctaaccttgttgattaagcatttaacttatttacatttttatgcttagggattaaaagtatgtctactttacatttatattcaggtatatatatatttttgttgttgttgttgttttttcttattattattatactttaagttttagggtacatgtgcacaatgtgcgggttagttacacatgtatacatgtgccatgctggtgtgctgcacccattaactcatcatttagcattagtatatctcctaatgactatccctcccccctccccccaccccacaacagtccccagagtgtgatgttccccttcctgtgtccatgtgttctcattgttcaattcccatctatgagtgagaacatgcggtgtttggttttttgtccttgtgatagtttactgagaatgatgatttccaatttcatccatgtccctataaaggacatgaactcatcattttttatggctgcatagtatatattcaggtatattttaaggcagtttttaagtatatcttttttctttaatagtacttacaaaaatgtaattatttgatatgacaaagctgcttcatattttcatattagcttgaactttccattgatatgtcaagcaaataaatacttagtttttttctgagtagaaaccaactgtactgcaaaccccattgatagtaaattaattgcagggatttaacatgtagggaaaccttaattattctgaatatacttatgttatgatgtgtagatgatttgtttactgtctttaatgtgactgagtcaaaatatgtgtagttatttgcataaaagggaagtgttgctaatatattttgcattacttaatgttatatataaaattaattttccttgtaagggatgtgagaaatttttttactcctcatttctgtttattctcatctatttctttgaaaatgtagatttaatttatttaaatactgtgtgatgaaaacattacagatatgttcttgctctctttttttttttgagacagggtctcactctgtcatctaggctgagtgcagtggcataatcatggctccctgcatgtcaacctcctgggctcaggcagtcctcccacctcagcttcctgagtgtttgggactacaggcgcgcactaccatgccgggttaacttttgactttttgtagagatggggtctcactatgttgcccaggctggtctcaaactcctggatgcaagcaatcctcctgcctcagcctcccaaagttctgggattacaggcatgagccaccacagccaatatgcttcattttctacctctgattataaattaaaggatagtattataaatgcttaattttataacctccaaatagtgatattgtattgctccttattgtgatggataaattataagacatatgtgtttaactggtttggtggcaagtctgtttacagaaatttgctgttaatttctcagttgttcacatgaacttatctgatttatagctttggccagcaatttacaaagaaagttcagtctgtagggcttcctgttgctctgagtgggggctccttctacccctgttcaacttcagtcagcccatggtctatagtatacctctcacaaggtccttatactgcagatcctctctgctgcagatgcttgggcttttgccttaagcacactggtgtaattagaagaagtagaaaagaagagaaagggtgaataataagagatgagaggatttaaaaatggttgaaacaggagttgtgaagtttgagtgtggtggatatggagatgtgcagccctgatcctccttcaaggaagaattgtggcccagttgtggggaggtcagtcatcagaaaaccttcagctgtctggcctacagaggacagccagaaaaaaaaaaaaaattgccttaagctgtcagctccttcaggctctacctcagttgcggagagcctccttgcttaaggtcacatcctttccagggcagcacttatcctgcaatcaagcaagacatgtttaaaggcccagccattttgttcaggcctgagacaactctgacaggtgatataccaccagagatctgccaggttgcttgaggctttgttgggcctgaattgcaatttgatttttccctctgcccaattcggctttcttccccaaatctcttcttcttctttttttttttctttgagatgaagtcttgctcttgttccccaggctggagtgtgatggcatgatcttggctcactgcaacctctgcctcccaagttcaagcaattctcctgccttggtcccctgagtagctgggattacaggtgggtgctaccacccctggctaatttttgtatttttagtagagatgaggtttcaccatgttggccaggctggtctcgaactcctgacctcaggtgatccacccgcctcggcctcccaaagtgctgggattacaggcgtgagccactgcgcccggcctctccccgaatttctttcacagggattgactgctaataaacatcatatacccaaaactacttcagtgtccattttcagagaatccagcttgcaacaggcaggcgtatcggcttcatgttgtcctaaaccttacgtaaagttctatgcaattttttttgtgaatttgcatttttcttaggaggtctgtggcttccattatcttctttaagatagacttgaaaattaaaggtttttctcatcaaggacttaagaaggaaaggcttaaacattttttttttgactcaagatcaaactaaatacacttggccattgaacaatatgggggttagtagtgctgaccctttgcacagttgaaaattgacatacgactttttactctcccaaaacttaactattaataatctactgtgtaccagaagtcctaccagtaacatagtctataaacacatattttgtatatgtattaaacactgtattcttacaataaagctagagaaaacaaagtgttattaagaaaatcatggccgggcgtggtagctcacacctgtaatcccagcactttgggaggccgaggtgggtggatcacctgaggtcaggagtttgaggccagcctggccaacatggtaaaaccctgtctctactaaaaatacaaaaattagctcgtggtggtggcaggcgcctgtaattccagctactcaggaggctgaggcgggagaatcgcttgaacctgggaggcagaggttgcagtgagcctgaaattgcgccattgcagctccagcctgggcgacaagagcaagactctgtcttaaaaaaaaagtcataagagaaaacctgtttattattcattgagtggaagtggatcatcataaagatctttatccttgtcatcttcatattgagtaggctaaggaggaggaggggttgctttttaagagggggcagaggtgattagtaggagaaaaattttaatgtgtgtatatatatatatatacacacacacattatatatatataattttttgtagagacagggtcttactttgttgcccaggctggtcttgaactcctgggctcaagtgatcagcctgcctcctaaagtgctgggattaccagcatgagacaccgtacctgactggaggaactacgtttttgatatggtactcagagaactgagtgcagtacagaagcttatacacccccttttttttatagggaagtggggaaatggagaatgtagacagttcttttgagggccagtaaatcatttaggtgggaggcagacattgtgggaaggtgagaggtgaagctgcaggttgtcttaccatgcagatgaaggccccctgggtaatctgttggagctgccctgggaagaatagatgaagtctttctgggcagtaatgatcatgacttccagcttcttctcatgtagtcgacctttcctgatcatttgatgagatccctaggaagggagtttaagacaattgcatttcttttggaaagaagcttttttgggctgataaggaaataccagagagagcccctctctgcgctggggtgggggacacgacaagttagagggatcttgattgtgaggcagcttctaaggcctttaagcatgtctaagtgccagtctttgggggtgtggtttgagagaccaaaatagatgcccctttattaactaggacagatcttaaggttaaggaaacaaagttacctatcggtagaaagttcagggccctgctggtgtggcaaatttctaaattcctatggctacaagaaaaatcactcttattaaactctctaacaataggagctttcagacaaattatcacaattctgatttacagcccagactactacaactctggacagaattcccaacttagaaacattcttttcttttcttttttttcttctttgagacagagtctcactctgtcacccaggctggagtgcagtggcacaatcttggcttactacaacctccacctcccatgttcaagaaattctccagcctcagcctccagtgcggaccactatgcctgggtaatttttgtatttttagtggagatggggtttcgctatgttggccaggctgttctttaactcctgacctcaggtgatctgcctgcctcagccttccaaagtactgggattacaggcatgaaccactgtacccagcccttagaaacattcttttctgataagctttatagaccttgagtttcaaccagctttagaggctgggcacaaattgtctttgcatcgtatagtttttatcttttgatgtaaagagccaaattccaccttattttaatgctaaagccccaccccaaagtgagcataggatgtatattacacatatgtttacccattgcacgtgcgctcagctcttctcgtaaatatgaatagctttcccctaaatctgctgaatatatatgattctgttgtgtaatatgggccctgtgaggcataaaacccaacctatccttcccctgtttgaagacagagcacctttggtttgcactggagactttttcttcgctggttgcaaacccatattcccagtaaagctctcctttctactacgtagcttctggttatcttttggatgacaggggtattgctttctgggccccaacactgggaagcagcacttaaccattgtaagcaaggagaagggtgtattaattttctgtttttcagataacaaattgacacaaatttagcagctttaaaacaatacccttttattatcttatagttctataggccagaaatctgatacagtgtgtctcactcagctggttctcagctccaggttttacaaggcagaaatcaagatgctgggaggatagtgtatgttcctttctggaggctctaggggtgaatgtttccaagctctttctggttgttagctgaattcagttacttgcagttgtaggactgaggttcccatttacttgctggctttttgggaagtggtgtttacctgtttaatctcagtggtgtttacctgtttaatctcagtggtatgtgtagttatatgggattgtgtgttttaaattgatctcttttgtacctttcctttctattcctttgatttttgttctttttcatctccttttactttctttgggtttatctattgttccttttcaaatatctttttttttttgagacggagtctcagtctgttgcacagactgcagtacagtggaacgatctcagctcactgcaaactccacttccccagttcaagcgattctcctgcctcagcctccggagtagctgggattacaggcgcctgccaccacacccagctaattttcctgtttttagttagagacagggtttcaccatttggccaggctgatctcgaactcttgacctcgggtgatccgccctcctcagcctcccaaaatgctgggattacaggcatgagccactacacccagcctttaaatatcttaataagaatacttagctcattcatttacagccttttttcatttctaagatgagcacttaagtctatacatttttctcagaataccttttttgtgtgacctggactgtgtgagatagttttttactttttcattttgaagtgttttaaatttcttttgttttgttttgttttgttttgtttttttgagatggagttctcactctgtcgcccaggctggagtgcagtggtgtgatctcggctcactgcaagctccccctcccgggttcacgccattctcctgcctcagcctcccaagtagctgggactacaggcacccgccaccatgcctgggtaatatttttttgtatttttagtagtgacggggtttcaccatgttagcccggatggtctcgatctcctgacctcgtgatccacctgcctcggcctcccaaagtgctgggattacaggtgtgagccaccgcgcccagctaaatttcttttatggtttctttttgacctgttgattgtttgggaattgtttagaaatacgggtttttaaaaagctattttttctttgattgtacattgtggtcagagaataagttccatgtgatatctatgcttagaaattttttagatttatattttgccagtacatgactacttttgtaatgttttatgtatatttgataaaaatatagattatctaattattggatgcagaaattcatatattccatatatcattatatgatccatacatattcaagcttgttaattattatttcctgaatataatctttgtttatttatatgcttgactggtcagtaatagaaaaatgttgtgtcaaaatctactgggaggggtggcgacgtagctcacccctgtaatcccagcactttgggaggctgaggtgggtggtctgcttgagctcaggagtttgagaccagcctgggcaatatggcaaaaccccatctctactaaaaatacaaaaattagccaggcttagtggcaggcacctgtaaacccagctactcgggaggctgagacaggagaactgcgtgatcctgagaggtggaagttgcagtgagctgagattgcaccactgcactccagtctgggtgacagagtgagaccccatctcaaaaaaaaaaattaaaaaaaaaaaaaaaaaaaacaaccctaaaacaaatctactgtgatgttaggtttgtccatttttttccagatttttttggcttgatatattttgagactattttattagatgcacatacttttaaaattactttgtcttactggtaatgtgaacttaaataattttgttatgatcctttctttcctagttgatcatcttttagtttaaagtttatctgataacaattacatgtagttaaacttctttcttttggtcaacatttgaccaatatgtcctttttccttctttcactttttttatttttatttttagagttggggtctggatatattgcccaggcagaagtacagtgactgtttataggcatgatgatagcacactacatcctctaacttgtggcctcaagcgatcttcccgtcttagcctcctgagtagctgggactacagatgttagccatcacactcagcttctttcacatttatacattaggagtccttttgctttttatatgtcttttataatagccattagttggattctttaatcttataatctttattttttaacataatgatttttgatttttgttcatccctcttgttcttggcttcataaaaaaaattgaggccagctgggcgcggtggctcacgcctgtaatcccagcactttgggaggctgaggcaggtggatcacgagatcaggaattcaagaccagcatggccaagatggtgaaacctcatctctcctaaaaatacaaaaattagccgggcgtagtggtgggcgcctgtaatcccagctactcgggaggctgaggcagggagatttgcttgaatctgggaggcggaggttgcagtgatccgagattgcgccactgcattccagcatgggtgacagagcgagactccatcttaaaaaaataaacaaaaaataaaaattgaggccaggtgcagtggctcacgcctgtaatcccagcactttgggaggctgaggtgggtggatcatggtcaggagtttgagaccagtctggccaatatagtgaaaccccgtctctactaaaaatacaaaaattagctgggcatggtggctcatgcctgtagtcccagctacttgggaggctaaggccagagaatcacttgaacccggaggttgcagtgagccgagatcgtaccactgcactccagcttgggtgacagagtgagacttcatctcaaaaaaaaaaaaaaaaattgagtgccttttacccagagcctcaccaacagaattgccaaacttttgattttttctttttttgccagtttgatcactaaatagtgatgtttcatcttacctcgaatttttttttttcatgagtgaagttgagcatcttgtttaaaaacatttgtggccaagtgaagtgctcaggtctgtaatcccagcaagttgggaggctgaggcagaggattgcttgaaaccaggaatttgagatcagcccaggcaatgtagggagaccccgtctctaaaaaagaaaaattaaactggtgtggtattatgtacttgtagtcccagctattcagaaggctcagggaggaggatcacttgagcccaggagtttaaggctgcaatgagttattattgcaccactgcacccaacctgggtgacagagttagactagatctcttaaaacaaacaaaaagtttacttttctcttttctgtaaaatgtctgttcatatcgtctctaccacacttatttttttggtgggattgtgtctttttagtgatatctgtgtttttttgttttttgttttttgttttggagccagggtcttgctcactgcaacctccaccttcctcaagcgattctcctgcctcagcctcccaagtagctgggactacaggcatgtgccaccatgcccggctaattttttgtatttttagtagagatggggtttcactgtgttagccaggatggtatggatctcctgaccttgtgatctacccgccttggcctcccaaagtgctgggattacaggtgtgagccaccgcgcccggccttaaacaagtttaaacacacacacacacacacacacacacacacacgttttttagagttggggcttgccttgtagcccaggctggtgtctaacttctggcctcaagtatttctcccaccttggccttccagatagtttggattatgggtgtttacccctatgcccagctctaaataagttttaatgccaaccatcacttctatttgtagagattcctaatgccacccagtgtaatgcttttggggctatggcagtgtaaatttggttttctcactgctgtttataattcagctttcttgggtctattgagttgatcactgcacctcactctgctttccactgtccaaaattttgtcaccattatttttttgtttttcttgtctttcagagttttagtgaggtttcaggaggaatcagaagttcatgcatgtattaagtcctttggttttactgaaagtttgacacatattttgaattgtagttattttgtctttcctaatttagatgcaaaattaagttgtctagtgagatactcagttaatcaagttgagatattaagggttacaaaaaggtttaccacactggtttatatacaggttaagtatccataatttgaaaatttgaaattcataatgctccaaaatctgaaacattttgtgagccgacaagagactcaaaagaaattttgaataaggtatactcaacttggataatattcatttgaagcatgtaaaggaaataatggctgttatgtgttatacacaaatgtgaagatagtgttgatttgatgctttacttttgataatgttgatctgatgccctggttttgatcacttaacagatacccatgtgctttatgggaagttgagttcttcttatgctcatgggctgagcccgaattaatccaaatcagtaatggtaattttatgccctctcccattgatttgatagtgagtggccttgagagccagttcattgggggaagttccccacttttttggtaaagaaacataagcaaggggaaggcagtctctcttatgatcctagacattaaattgttacttgcaactagtgtagctactttgaaaccgttaggggacaaaaagtcatcacactaaagatgacacaggaaaaacaaggaaagaacttaggtccatgatcttgatgaggcatcataaattacctatccctggagctgctgtagctctggactttttgttatatgagataataattcctcagattgacttagaataccaatcaaaataactattattttagctagctaagaaaaaaaatctgagtaaataccataaggttcagattacataaatatgaagatcaaaactgcaagttttctgagaagttagttattattgttttttactaatatgagctgcattggaaatttattttctttttaaaaaattattgctgtctttgtccataacttttatggacctgacattttagttgtttggaaaaattggtaattttaatcttttgttttggtatgattcaggttgacctgacattttaatacatctggctcctaggactgattaaagagacattttatttgttgaaatatgcacattttcttcatgaaattggttttcttttttatgtgtgacttttcttgcaaaagcttacaaggcacatgcttttgatagcagtgttacatttttaattaatattttagatgtaaaaggtgacagtttaaaagattgttttattagtgggttatccttaaaagcaagtggcatttggttttattttacaatagagtttaatcttacatgttttttgttaaagtaatgttaccaaaaaatctcttattgaactatttgtggtgaactttttaaggatgtttaagatttcacatgcagtttaactgatcacagatgaagttgtaaattaatacctcatgagcgtatttgactgcagggcattgttgtgaatcaaaaccgctttgttcctgtaaactgtgaaaggggtttaagcatatggattaaaattgcatggtgataccgaagtacttatgaaaagacactgtagttggatcatttaaaatgtactaaaatattacgaatagccataaaatataataattccctgaagcttttaagagtggtaagatttagttttatttctttgttggatttaactactttaataagaaattgttttgttgcttttggaactatgcatagtaatgagaataaccatgatgatgagaacactggaagcttcccagaaaacatgtatttcttcagaaatgttcttggttgtgacaaatatatatatgaagcttttccttgttcccatctgagtcattcccttaccagaacctttagaatgaaaggtttaatgatatcttctagtataagattatgaaatgagcattgtttagtgtaaaatcatatttttcttttgctgttaattttgtcttatagtatatgaaaatcacctggtgtagaatgtatttttcctgccataagaaactgtcaagaatctattgaaaaaataccatgagagtagttgttctggatgacaatggtaggttctgatttactgacgtagaagcaagcttcagttagccactttagtcataggtaaacactagattagcctaaggaaaaattgttgggaagcttttggagttctcatctgtgtcactgttttagatctcttcaagttctttgaaaattttggtacctccctgtttaacaaatattctgttttctgctatctaattagttctcatgtagatgacgtttctaatactaattaccacactttcttggactcctcttttataacgacctttatctccattccatttgatcaactgttttttaggactatgttctgaacctacttcctacccaggactgctttaaaaaaagtaatctatgttagcttcctgtttggcttcttcctagtttgactttactctctatatacagcctgagtggcatgctcggttatttcagctacatcttaccattactcagttctctctcccttttgaccttgctggtttctaaatctgggtcaatttgtgtgccttgcttcttgacttgatattacaattaacttattttgtcatactagatgttttcagccatctttgatccccaggttgctcaccaactcttattatcctttgaaatgactctcaaatcttacccctctttttgacttttatgtttgttgccctcatcttcatcttttttttttttttaatgagacggagtttcgctcttgttttctttctttcttttttttttttttttgagacagagtctcgctcttgcccaggctggagtgcagtggcgccatctctgctcactgcaagatccgcctcctgagttcacgccattctcctgcctcagcctcctgagtagctgggactacaggtgcccgccaccacgcctggctaattttttgtatttttagtagagatggggtttcaccgtgttagcctggatagtcttgatctcctgaccttgtgatccgcctgcctaggcctcccaaagtgctgggattacaggcatgagccactgcgcccagctcgctcttgttttcttgttgcccaggctggagtgcaatggtttgatcttggctcactgcaacctccgcctcctgcgttcaagagattctcctgcttcagccttctgagtagttggcattacaggcgtgtgccaccatgcccggctaattttttgtatttttagtagagacagggtttctccatgttggccaggctggtctcgaactcccgaactcaggtgatccgccagtcttggcctcccaaagtgctaggattacaggcatgagccaccacgcctggcaaattctattttttttttttttttttgagacggaattttgctcttgctgcctaggctgtgcaatggcacgatctcggctcaccgtggcctctccctcccaggttcaagtgagtctcctgcctcagcctcccaagtagctgggattacagacgtgtgtcaccatgcccggctaattttgtatttttagtagagacggggtttctccacgttggtcaggctggcctggaactcccaacctcagatgatctgtctgcttcggcctcgccaagtgctgggattacaggcgtgagccactgctcccagcccttcatctcttacattaggtgccatagcactcacctctgtggctctgtttcttctatcccaacagcacatgagggattgggtccccttccatctctccaactccctactcctactaccacataaattaacagaaactccctttagtagtaattctcaaatgaggtgccaaatcttggtctgtatggaatgtgtatttggttttaaaaaaattctaaaagtgattctcttctgaggtcctaaagggtcttttgcaggacttcctcaaattcgtcttttacaatgctataggagtcatctttgtcaaacatagatttactcattttacaactgtgtaacaacttattttttgccaagtattgggatagctactggagttagtaaagtgaatattagggtgcttacttttgagaaaaatgctaataatatagtatagccatcatttactggaacttttttaagtgctaggcacttcatgtatttatccttataatagtccttcagtgtagatattattagccactgtacagatgagcagccattctcagaattctgaggactcacatagtaattcattaggcaagtgataagctttatgataaatacttgaaagggacctctaagagcatagaggagggatatctagtttagagttggaagattaacagaataggcttcacagagaagatgatgtattaagctgagtatttaaagacaagtaggaacttagacaaaatgatagattggaaaatgagtgtgtggcatggttatatttgtgaatagtctttgtacagagatataagagaagcattttatgagaacacctggtgctcacttaggcaacacatatactaaagttggagaacagctcaatatgactgaagcatagtatgtgagatggggaatttagagtggtttagatataaagacattaaactaggttgtattttatatatttatacatctatatctatatatctatatctatatgcatctgtggtcccagctactaaggaggctgaggtgggaggatcgcctgagcctgggagatcaaggctccactgagccgagattgcaccattgcactccagcctgggtgacagagtgagaccctgtctcaaacaaaacaaaacaaaacaaaaacccagttagactgctggaatagtccaaataagaaatcaggaggccttgaaacgtgtcagtgggattaaagaggagagaggtggaattgaaggttatctggtaggtgcaatcaacagacttagtggtttaaaaagtgagtgagaggttatagtcaggttgggactatgtattaatcctttatttttttaatttactgtactgtactatgtattattgttaatatcctttatttcagattgacatatacccttaaatattcttaagatcatatccttaaggtcttaatagtctctgaataaatattggtataagctgcttcctaaatgatttcccatttatttactggtgtttttatatatctatttagagactgaatctcactatgttgcccaggctagagtgcaggagcatgatcatagcttactgtaacctcacactcttgggttcaagtgattctcctgcctcagcttcccaagcagctaggactacaagtgtgtgccaccacacctggctcattttttaatttttgcagaaacagactcttgctatgttgctcagactggtctcaaactcctggcctaaagcgatccttcagtccctgcctcccaaagcagtgggactgcaggtgcgagtcaccatggctggcttgaggagtgttttttaaaacatcctggccaactgtgagcattgagacatcaatttatcaaggctttactgagtgctcaagggcccaggcacattctaagtcctggaagagggagcacagtggaagttctaggacttagctatctagttaaatatcttcagtttaaacagatttactcattttacaactgtgtaacaatttattttttggcagtttctgaacttccagttttcacgttctctagtattgacaacaagctgataatcttgctagacacaacagactcttgaggaaggaattattcattgtggtttatagacaatgatatttgaagttaacttgccccagggcaggagtatggttcttatataatgtaggaaaaggccagtcaacaccagacctcagagctaccatttaatgcattgtggcaaatgattcgcatgtattatcacacttaatgctcacaagaatactaccatgaaatagttaatatttaaaacaaatttttttattttttaaggagactgggtctcactatgttgcccaggcttgtctcgaacccctgggctcaagtgatcctcccacctcagcctcttaaagttctgggattacaagcatgagccaccgcgagtggtctttatcattattatcgctgttttacagatgagaaaactgaggcacagagacctgcttatggtgacacaagtaggaattgaaaagatgagatttgaatctagctggtctaatttatcctgaagttcaagatagcaatacaagaattatgaacatataaatggagtgagtggatatgatcgctcaagataaatctcttggccgggcgcagtggctcacacctgtaatcccagcactttgggagactgaggcgggcagatcacgtggtcaggagatcaagaccatcctggctaacatggtgaaaccccctgtctactaaaaatacaaaaaattagtggggcgtggtggtgcacgcctgtaatcccagctactcaggaggctgaggcacgagaatcacttgaacccaggaggcggaggttgcagtgagccaagattgcgccactgcactccagcctgggtgatagagtgagactccgtctcaaaaaaaaaaaaaaatctcttggatgagaaaactagacttaggatttaaggaaatctacgttaatggactggccagaaaaacaagtcataaaggaaaattaggaagtaatcatgagagagggggatgttatgtcctattacctgaagcagaaatataaatggaaaacatatcagtgttattaactgaagggaaaagaaaatataaaaatatatctgttataaaatatattctgtataaaactcgaataccagattgttgtttgcattgacgttgcctgtaatcccagcattttgggagggtgaggtgggagagctcaggagttcaagaccagcctgggcaacatgatgaaactccatctctacaaaaaattagctgggcatggtggtacatgcttgtaatcccagctactcaggaagctatagtgggaggatcacttgagcccgggaggttgaggctgcagtgagccataatggtgccactacactcctgcctggggcgatgtactgagaccctgtctcaaaaaaaaaaaaaaaaaaagagaaaaaaaaatttttaagtacttttttacttagaacctttcaaatgccatgttatgtgtctttatatacagaaaccctgggcaaagacagtatggctctttttttaagaattaggagacatgagtgtaaagcatatttgtaaataacgggcaataaaattaatgcggaaggtttggcttacattatttggggagggaacatataaaattcaatattcaaattgttacatcaacttgaagtacagtgaatcatgactcagaaaatgtatgaagatgagacaaggtagttgcctattggaatcttaaatgatacttttagtagagatcatgtaaatctgtgttgatgttaaagaaaagtgaacataggctgagcgcagtggctcatgcctgtaatcccagcacttcgggaggctgaggcaggcggatcagctgagatcaggagttcgagaccagcctggccaacatagcgaaaccccatctctaccaaaaatacaaaaattagccaggcgtggtggcgggcacctataatcccagctactctggaggctgaggcaggagaatagcttgaacccgggaggtggagattgtagtgagccgagatcacaccactgcactccagcctgggtgacaagagcgagactccatctcaaaaagaaaagtgaacataaacttttaaaacttcattacagagtaaaaagtcttattacgtttttctggccaaaatttataaacttttaaaatatttcagtgaagttgagctatattagaggtatctctttatgtacctctggaatggaactttgataactgtttattacagtagaaaataggatctaaaatgggtaagttcattatttcactttgctttcttaatattcatggaaggtattttgccgaaattatttttggagagtatatgaaaagtaagtaatattttataaaactgtattgcagctgatttggagaatgagtggctactttgaaaattgtcagtagataggaaataaaaataacagaatgaagcagctcacacacttcagagtttattctcaatattgttgaattgggccataatgaagcataatgcctggttaaactttattgcaattcaaacatcccaccagaaagaaatttttaaaaactatatcaacaaataaattcactgaagtctgtctatagcttcttctaggaactacaatttatttatttgtttattttaatattgttttttgtagagacaaggtctcactttgttgcccaggctggtcttgaactcctgggctcaagtgatcagcccgcctctgaaagtgctgggattacaggcatgagccaccgtacctggctgaaggaactacatttttgatatggtactctgctttaaacgcagtaggtactctgctgaattgggctaaataaacatttcacctctcaaaactatgtgaatatttggcttaagcaaagatagcctgggaccatgaagaaagctaaaacacttaaaaaaaatgtacccttatttaaaaagtagcatgtttctttctgatttggagtgttatgtttttgttgaaaaattggaaattacataaaaccaaaatgaaaaatatagagatgatcagtaatttcaccatgaatataatactcctcttatcattttgtattcccttccaactaatttttctcttaaaagtggcactatgtttttgaaaaagctgactactttaagaaaatttctctcagtttactttcttaatcgtgtgcttttctgaagagttggctctgacgttgactactatagtaaatccaattttgatgagtttttcttttttagtgggccaaaaaaaaaaaaaggaaagaaaattctcctttgtagaaaaaggagggaggatggaatgtatattgtagtacacctgaaaatccataccttttcttagccatatacacaattagtttactctttctcaagataatatttttatagtaaattaggattctttgttacaagtgatgggaaaccaaactagtgctatgctaggttaaaaaaaggaatttagggactcaagtcactaaactactcacgcgcacacacacacacacacacacactcacacacactcacataggggttcaattgggccttaggaatggctaaatctaaggtctcaaaagctgtcagtttttttccttcggttcgttctttgtctctgagagttagcttcactttgtcagcctgcttctttatactcttcctgtttttcactctgacttactgtgtttataattatcttgggttagtttttcttattgctcatttggaaaaactatcagtacttctgattagtaatttcagatgtttttatattttaattttgtatgcaaaataagtatccgtgatattttaaaaatatttactaagtatttccctagtctttctctaaagggtaatctcaaatgaaacaactggaactggattctcatttgtttaatgactgaagaagtcttccaattactctacaaaccattgataacttttgttatttgtgaccagtattcatctagtaagatgttaaatgcttttatgaaagagacaagtgttttacctaaagaatgagaaaaaaaaaaccctaattttttgtgaagttttctccttttttgctgagtgcttaaagaaaaaaagtttatgttgttttaggtttttcttcttgcttatcaccctaggaactaattgtgttactttttaaatgtttaaatttaatttttcctgtcccttccccatgcttgctaattatgttttttaaaggtgaccctttaagatggctcttatagaataaagagagacactgaattttctaatcttgtggaagaggttatatttagccattggtattttaagttggagcacttcattctactgtgcctttagtttatgagtcatctggagaaaatgggctgcttcttgcttttaggaagagtctgtagcaaataataataataagtgctatgggagattttttgccaaataatttaaaatggaaaatgttttgtaatatattttattgcccatatgtaaaatacgtactaaagaatataggagtttttggctcattattatctttagctcataaaaataaacaaaagaggctgggtgcggtggctcacgcctgtaatccagcactttgggaggctgaggtgggcggatcacgaggtcaggaaatcaagaccatcctggctaacacggtgaaaccctgtctctaataaaaaatacaaaaaattagccgggtgtggtggcaggcacctgtagtcccagctactcgggaggctgaggcaggagaatggcgtgaacccaggaggtggagcttgcagtgagctgagaccgcaccattgcactccagcctgggtgacagagtgagactccgtctcaaaaacaacaacaacaacaacaacaataacaacaaaaccctaatgtcacatataacaaaaagaaagcattttctaccaaaacattatatagattgttatgagttataggtaagtggaaagcaagcataaaccatatgaaattattttatatgcaggatgtacagcagtggtcaaatcttaatgataattgtcagtaactggggagaatattgtgattattgaagtattgattttttttcaaatatttttatattacatgtggtaactttttataatcttgttttatatctactttagtatgatagctttaccatactagatattctatgaggggtagacagttggcaaaggatgtgatattgattctaattttggctacctttgtattatgtgtatcataatgatttcacgcttcagttttctcatctgtacagtattttgttcttcgtgacttttcttgcaggaatgaaaggaggtagcatggaacaaagaaaaaagtgtatcatattgtaaaacaggaaattttaaagtcctagagttcagattttaaatccaagatgtcatttttgaggtaaatttgtcaggtctccctgggacacagaatgactgcatcactagaatcatgagcccgtgggattgtttttttctttttctcaaatgtatttatttaacatctctctccctctctacttacctacctgcctacctacctacttacctctgttgtgaaacttttgggagctcagtattgtctactataccaagaataccagtcctttactcatttttttgcattacaaagatcatatggaatatactggaggggaatttaggtcttttggttctgtgttagaagagcccattttgtttttccctgcatgtggtagtcggtgtataggcctgtttctgtgatgggaagatgacaccttttgtcaaatctctatcctttttgtatgtcaaggaatcatttctttgcagtgaagtagagtgtgccctgtagtatagcactctgtgtccttagtcatagcaatattggaggattggagagttaatcatgtttgagaagttaggggacttgttctttcagcatctatttaatgaatctgcttgtatttttgatatcctaatgtgtcccaacactgaactcctaatctttcctctaaaacctgttccacctgcagccctctctatttcacttgatggcagttttatccttctcgttattcaggataaaaacctgagactcattcttgtttttcctctttctcttatatcccacatctaatccttaaggaaattatactggcaccacttgtgaaatatatcctgaaatctgatcacttataccatctaaatcgctaaagtcatctgtacccccacctctcttttgtgccaccatcatcctttgcctagatttttgcagtagcttcttagttactttctttccacctttgctgccttcaatatcttgtcagcacaacagattggcggacattttaaaaacgtaagtcagataatgacactctaataaaaatgagaaaggtttaaaaatagtaaagataggaagcctggacaacatggtgaaacaccatctctacaaaactagctgagtgtggtggtgcatgcttgtggtcagctactcaggaggctgaggcaggaagattgattgaacctggaaggttgaggctgcagtgagctgtgattgtatcacttcactccagcccccgtgactgattgaaaccctgtctcaaaaaaaaaaaaaaaaaaaaaaaaaaaaggaaatattatttgcaggtgaaatggttgtatttagaaacaagaacatttaagtggcaggtagttacagaattgatacacacaaatatattttttatacttttgtatgtttaaaaaagccacaaattacaaattatgttaacagcaatataaaaagaatgaaacatgagtggggtttattctaagctgagttgttcaaaattagggtatctattaacataatttacgatgcttctcagagggtttctgttgttcactcagtgactgcagacccactagtactaatgaactactctcttaacttgttattgaactacaccttctccaatgagtctgagtctttaacattgcatactcttttaatctgccttggggtactatatagagctttcttatatcttatagttactcttttattagagttaaaatacttctttatgttaaacttctgtttaccttactctgtgatttatatcttttgattagaaaagactaatgtaccatattagtaggtttttggataaatttttatattattttcatagatgctagaagagcatttgccaaaattcatcattgattcttttattaactttttgtgaattaaagtataacatacatagaaaggtataaaaatcataagtgtacagctgaaagaattactgcaaagtaaacatacttgcttaactaccatttagttctagaaatagaacttggccagcagcccagaagcacccctcacccccaccttcttccccaaaggtatcttctgtcctgacttctaacattggagattacctttgctgttttaaactttaaatatatggaatcatatagtgtgtactttttgtctctggcttctttggctcatcattataagctttatccacattgttgaacatagcagtgcttttgttcattttcttttccatgtcctattccatcatatgaatttatctcagtttatttttatattctactgttgatgatgaatatttgggttgttactagtttggccatattacaaataatgttggtatgtgaacattcttgggtgtgtcttttggtgctcatatgcacatatttcttttctttctttttttttttttttgagatgaagtcttgctcttgttgcccaggctggagtgcaatggcacagtctcggctcattgcaacctccacctcccgggttcaagtgattctcctatctcagcctcccaagtagctgggattacaggcacacgccaccatgcccagataatttttgtatttctggtagaaatggggtttcaccgtgttggccaggctagtcttgaactcctgacctcaggtgatctgcctgccttggcctcccaaagtactggaattataggtgtgagccaccacccctggcccaaagtgttatctttagaacagcagaaatgggagttccagtttttccactgttattttctatcttcagacaaacaactgtttagttatactggtaaactggcagtggtatatcattgtagttttaattgtatttccttgaccatgaccactaataaagttaagcttttaaaaatttatttatatgttgatcaattagatatacttctttgtgaattacttaagttttttacccagttttctattgggtgtttaagaatattttatatttatttatgtatttatttttgagacagggtcttgctccgttgctcaggctggagtgcagtgatgtgatctcggctcactgcagcctccgcctcctgggttcaagtgattctcccacctcagcctcctcagcagctaggactacaggcgtatgccatcatgcctggctgatttttgtattttttgatagagctggggtttcaccctgttggccatgctggtctcgaactcctgaactcaggtgatctgcgtgcctcagcctcccaaagttctggtattcatctgcaagccaccacgtccggcctgtttaagaatttttaatgaatttggctggatgtggtggctcacacccgtaatcccagcactttgggaggccaaagcgggcagatcacctgaggtcaggagttcgagaccagcctggccaacatggtgaaaccccgtttctactaaaaatacaaaaattagccgggcatggtggcacgtgcttgtaatcccagctgcttgggaggctgaggtgggagaatcacttgaacctgagaggcggaggtggcagtgagccaagatcactttattgcactccagactgggcgacaagagcaagactctgtctcaaaaaaaaaaaaaatttttttaaatgaaaaatctctgtactcagggctatgacactttttggttggcatatgtctttttggacttgttctttcattctttaaatggtgtctttgatgaaccgatgttcttcattttaatatggaccctctttttggtgttcctccctttttttagttttcagaagatattgtctatgattggttttacttctattggttttatttcttaaatgtttggtggaattcactggtgatacccttgaagcctggagttttctttgtaggaatgttccattaaaaaaaaaatacttaaagggctttttagattttttttcacttcttaaatcaactttggtaaaatttctttttctaagtatttgtacattttgtcttaagtgttaaaatgcgttagcataaccttttccctacagtatctttctgtgatttttaaatatgcatatgacctatcatttctgctaatgattatttgtgccttctttgtaagagttcatcaattttattagcgtttcaaagaactaactttggctttgttggttctctgtagatcatgatgtatgttttctatttccacgtatttagctccttttttttttttttttactttctttgggtttcatttgcagtttttttccttaccctaaccctacagttgtttttaaaaaaagattcttgagatggatacaggaccatataaaaaattttttttatgcatggcaagaagtttgcataaagtcagaagacaaattacaaacttgtaaaaaaattatttaataccaattacatcaaagtccaaggcctacttctttaatatgtagtgagtttctaaaagtcaataagaaggaaataattatgtattaaaaatgagcaatgtttgtgaagagttgatgtgtagaaaagttaatattaatggcagtaaaacatatgaaaggatgttcatcgtctcatgaggaattcaaaataaaccttctattattaaattggcaagtattttaaaaatcagtaataagtagtatgggcaaagttatagagaataggcgctttcataagctatcataaggatataaattgctacaacctctttgaaggagaagtttacattatttatcaaaattttaagtattcttttttttttttttctttttttttgagatggagtcttgctctgtcacccaggctggagtgcagtggcgccatcttggctcactgcaagccccgcctcccaggttcacaccattcgcctgcctcagcctccggagtagctgggactagaggctcccgtcaccacgctgggctaatttttttttgtatttttagtagagacggggtttctccgtgttagccaggatggtcttgatctcctgacctcattaaccgcccctctcggcctcccaaagtgctgggattacaggcgtgagtcatcgcgcccggcccttaagtattctttaattcacgaactatgtgtataaagatgtttatttccatattacctataaaagccaaaaaactagacataacctaaatgtttattctagagactaggttgtagctacccaatggaaaactatgtagccactaaaaggcaatagactgttggtactggttgttacagaacaagctccaggaaagtttttttgcagaaatacacattttattaaacgagtttgtgggtgaagtgtttgtattttgtgtgtgcatagtaagtttctgaagtgcataactttgtgtatctcactaggtaaatttgagtgttgtatttatggagttggatttacaacatctggtatttactattcagtatcactttaggttatgtttcgttttctcacttatattgtaagctcatagaaaatggaagatatggactgtgttttatgcttcataattttctccacattgcctagcatagtatattgagtgtgaaacagacttggtttttaaaaaacaatttaagaacaaatttaacactaaatatttgttttccagtttcagaacctgttcacattatctttggtgagctgtattgtagctctctgtagtagataggtataatactcattaatttattcatatgttaccatagggcgaactgagcccaagtgaataagtgagttatttaaagtaggggttggcaaactatgagctgtgggctaaatttgtcccacctcttgttctttatggcctagaagttaagaaaggtttttatatgttttaatgtttgggagaagaaagcatattttatgacacatgaatgttatatgaaatttaaattttagtgttcataattaaagtttattagaagacactgatgcatattcctttatgtattgtctatggctgccttcccaccactatggcagaattgagtcgttgcaacacagattggagttggcattttcattgcttcacactgctgcttggcatactacacatctcagtaatgcagttataattcaacagtgtttcaagtgccatatgtattgctgtgctataacactgtattttttttttattactagggcatacctatatgtcaaaacaagaaaaggagaaaatctcatggttttaaagcacagtggactggggattattttatccaattagatggtaaagcattaggtttattatgcccttctaaagaaatagaatatatattgccattaccaggctaagcacttacagtgttccaaattcataggaacataattctcataaaaattcaaaaatttgaaatgtaatatgttacaacagcagaatttttcatgcactcactttttctctcactcactctcacactgaaaaggaggctggacttaatataagattttgaatgacccatttgttagcaaagcaaggagagctatttactaatggtaagttagtaaattttcattgtagcagctaaagaatattttcagaaaaaaattacatttttaaaaatatcattagccatttggtgaccatagttgctttaagaattgaggacattaggctcgttgcagtggctcacacctgtaaccccagcattttgggagtctgaagcaagaggatcacatgagcccaggcgttcaagaccagcctgcgcaacatagtgagaccctatcttttcaaaaataaaaataaaaagagtattgaggattttaggccaggtgtggtggctcatgcctgtaatctcagcactttgagaggtgaaggtgggagaatccacttgagccctggagtttaaattcagcctggacaaatggcaagaccctatctctaccaaaaaaaccccccaaaaaaacaaaaacaaaaacaaaccagaattgaggacattagccaggcatggtggtgtgcacttgtagtcttagcttcttgggaggctgagatgggaggatccgtttgatcccaggagtttgagttcagcctggggagcatagcaagaccccatctctaaaataaaaacaaaaaagtgaattgaggacattgggtgtaacatcggtagtcagttaaagaagatagtggttttacttggctctgatgaaccaacagatgttactgacactgatcagttattcaaagagccaatgctgagtttgaagtgactgaaaaattagctttcatgaaaagtcgatgaaacatctgcagacgtgaatattttcaaaaaatttgagaaaacactaattcagcataatctgaagtagaatctgttaagatgtgttgctactgatagtagtaaaaatatatgtggaggccgggcacagtggctcaagcctgtaatcccagcactttgggaggctgaggtgggcagatcacttgaggtcaggagttcgagaccagcctggccaacatggtgaaaccccatctctacttaaaaaaaaaaaaaaaaattagcagcgtgtggtggcatatgcctgtaattccagctactttaggaggctgaggcaggagaactgctcgaacctgggaggtggaggatacagtgagctgagatgatgccattgcactccagcctgggtgacacagcaagactctgtctcaaaaaaaaaaaaagaaatatatatatatatataaaatatattaaaatacatatttatatcataaactttgtagatttctccacttaacctttttgctccatatatattttaaatatacattatacatatatatggatcagaaaaaagggttaattggagaaatctacaaagtttgtgaaactataaggttgtaaagcctatggctattcattgtattatttattagcagctattttgtagacaacatttgaatctatgatttattatttgaatatcatttattattgaaccagtattatcaacagtgaacttcatttgctgtatgaagagatagttctgtaagtttttatcagaaatttaagctgtatatttgacttgcctgaccacccatcagtttgattactgcagttgtttgagcttatggtcaagattcaaatttttctaaacaaggagaagctccttcaactactgttattgcatatgaaatggctttgaaaattagcttttactgaagactttatattgtttcttttctttcttcttcttcgtcttcttttttttttttttagaaacaggatcttgctatgttctccaggttggtcttgaactcctggactcatgtgatcctcctgcctcaagctcccaaagtgttgggattataggtgtgagccatcatgtccctggctaatacattatttcttaatgatactgatattgttgttgtttgtttctttctttctctctctctctctctccttgtttccttccttccttccttccttccttccttccttccttccttccttccttctttccttccttccttccttccttccttccttccttccttccttccttcctttctttctttcttctttgtctcttttctcttttctcaacagggtttcactctgtcacgcaggctggagtgcggtggtgctgtcttggctcactgcaacttccacctccctggttcaagcaattctcctacctcagcctcccaagtagctgggactacagcctcatgccaccatgcccagctaagctttttgtatttttagtagagacaggatttcaccatgttgaccagcctggtctcaaactcctaatgtcaagctatccactcactttggcttcccatagtgctgggattacaggtgtgagccactgtggcagcctttatatggtttcttaattttgaggcataccagtgcttatatgtaaaacttatactatggtaaagttatttgacagcagctaatgtagtttgaatcacaagtaatgtcaagctgctttatatacaatgtcccattctgtcaaaagttaaaacaagaagtgatacttctatttccacacacatttgtagcagatgtttgtgggctcaaactatagttttagcaatattgatgccagagcagagataacttctttatttcaaaatccatctaacactgcaatcacggagcttctaccttatgttacattagaagtgattaatctgcaatctacatgctaaaggggaaatatcaagaaaaagctctgatagaattctataaatgctttctaagtgataaatatgcttaatttaaatcatatgctattggatttatatcagtatttgggagtatctatttgtatatagagacattcaaagttgaaatatgtgaaattattatagatcaatgttaacagatgaatatttgcgatcaattttgattgataacagtaactttggccaggcacagtggctcacacctgtaatctcagcactttgggaggccgaggcaggtggatcatgaggtcaggagttcaagaccagtctggccaatatggttaatccccatctctactaaaaatacaaaaaattagctgggcgtggtggcgtgcgcctgtagtctcagcttctcgggaggctaagacaggagaaacgcttgaacccgggaggcggaggttgcggtgagcccagattgcaccactgcactccagcctgggtgacagaatgagactctgtctcaaaaaaaaaaaaaaaaaaaaagtaactttaaacaccaattaaatgaaatgttatttcccctaaaagaattacattcttctcattactaaacctgataaacaaaaaattttattgttattaatattcctaaatttgtcagtaaaagttttttgttttataagtacctagataatgtccttggtttttttctcattacccatagagcccaaactatttactacctggccttttacaaagaaagctttctgaccctcatcttcttctaaaagaataatagatgtctaattagaaaccagttatgcattgggttgagtatcctttattagcattttaaagttcttgcatttcgaaaatactaaaaatactcaaatttagaaaagttagttgtcttcataatgtaatttaaatgtttgaagtgttacaaaagagattcacctgcaattaaatatcagcagagtgtgtcctgtacccttatcctgcaacacttttctcctatagtaactgaatgactttggaattcagggctttgtatttttacctttttttaaagcttatttttgctttcttttcttttctgttttttttttgtttgtttgtttttttttttttttttttttttttttttttttttttgagatggagtcttgctctgtcgaccaggctggggtgcagtggcgtgatcttggctcgctgcaacccctacctcccgggttcaagcgattcttccacctcagcctcctgagtagttacaggtgggaccaccatgcctggctaattttttgtattttagtagagatggggtttcaccatgttccctgggctagtttcaaactcctgagctcaggcaatcagcccacctcagcctcccaaagtgctaggattataggcatgagccactgcccccagcctgtttttgctttcaaatggactgttgatggttttctcagagtgctttacttttgaagtccagtttgtactggaaagaatttatattccaggctgggcacagtggctcatgcctataatctcagcactttgggaggccaaggcagatggctcacttgagtccaggagttcaaaaccagccggagcaacttggcaaaacctcgtctcttaacaaaaatattttaaaatgagctggttatagtgctgcatgcctatggtcccagctacttgtggcactgaggtaggaggttggcttgagcctgggaggcggaagttgcagtgaacccaaatcgtgccactgcactccagcctccattacagagggagagcctgtctcaaaaaaaggaaacgaatttatattccacattttactgagtctagtgtgagtttttgtttaaaaaaaaacaacccaggaataatttcttcaaattcataagcatggcaggcagttttattttaaattctgtgggaaatatgaatttaaggatctcatgtaccatgccttgataatcatttctctgtaatgtatattttggcaaatgatattgttatgaaacatacttttgcattaatattaactttatgcataataaagatgcatcttcagttttttgtttgtcctatgagagtttacagctggggacatcttttacaaaagtatatttataacctgttcagaagatatgaaacacaataatgagataatcacctatgtatttttcagttagcagttacaaaaggattattgacacttatagttgttaatatctcagtaaaaacatactcttgtgcttattttaaaattgaacgctagtctatatttttaaagtttccttttatggaatattttgtcttttggcactttgcatctggattatagttcccccatttaagaaagaaacctgtttctattcaataggattaaaaacacactttcagttttagagcagatttatcatctacccttcaggctattctttaatatggagctcttaaaaatgagtatattaagatattccccagatgttttaaacttcagcaaacttgtggttttctttatttgtagtatttggaagatgaaagaaagtatctccagtatctaaacacttttcatattggttttaatgttgttttttttttttttttttttttttttgctagaaaggcatgcacaagataaagcttctacactgataaattttcaaagtccttgcttttaaaatatcaagctgggtgcagtggctaacgcctgtaatcccagcactttgggaggctgaggcgggtggatcacctgaagtcaggagttcgagaccagcctggccaacatagtgaaaacccgtctctactaaaaatataaaaaattagctgggtgtggtggctggtgcctgtaatctcagctattagggaggctgaggcaggagaatcgcttgaacccgggaggtggaggttgcagtgagctgagatcgcaccattgcactccagcctgggcaacaagagtgaaactcttgtctcaaaaaaaaaaaaaggtattgtcaaaatgagagttgtattagcagtaatgtaaaagtaatattgtatgtctgtatacttttgaatttacattgttatgtgattcatatttgttttgtatagctgtaacatttggttaattgtttagtgggttattgaatagattattttcttcattacttagtacagtggggattgagaatgctttgtatcaagtgtcttacaagtattgggaagttcgaattaaaaatattaaagatgtcagtcatttacttctttttttttttaaggtggtagcccaattgaaaattttctgcaaaatcagtaactaagttatttttccacaattataaacttagttgatggcatttattgagtgcttactacgttcaaggtaaatgaaatgaaagagtggaatagtgcattatacacgcacacactcaagggaagcaagtataaacaccttatttcatctcacttgtttagaaatttgattttgttttttcttgctgggtaacatatctgtgttaatcgaaaatttatgacttagagtggaatttctctaaaaagcagtaggtgacagggatacaagataaataatttcatcagagaatagaaattcttttttacaatggataaaattgtgcttgtaacagggatacaagcacaaaccaaatcaatgtttaattattttaaaaatattcaagggaaatctagttttgttaaaatttgtataggttggtagtgtgcatgttcttaaaaatccaagaacaatagcagcagcaattcttatttaatctttctttagtgtgtccattcaaccattcattcatcaatttttttttctgtgtacccattattcatcaggcactatgcttaaatatcgtggaacacaaaaagaaatagtctttaatgctgtgttttacaaatgaggaaacctaatctcggagaacttaaattacagttgtcctttggtattcatgggggattggttccgggaacttcctcagataccaaaatccaaggattctcaagtccctgatataaaattctgtggtatttgtatataacatatgcatatcctcccatgtactttaatttctagattacttataatacctaatataatgtaaatgctgtgtaagtagttgttatactctcttgtttagggaataatgtcaaggaaaaacactctttacatgttcagtacatatttttccaaatattttcaatctgtggttggttgaatccatggatgtggaacatacggatatggagggccagccgtacttgccccatgtcatataattagatgaatatagaattaaagccaggtccgtctgacagagcgtttgcttctaaccattgaggaatgttgcctaccctgatgactctactataggaaatcatatattgatatcaaattgatcttatatgtctgtagtgaggaacttggccatgttggacctatccccttccctccttgctcctctcctttcttcctcccttacccccacagcttcacccctcccttagctcttttttctgacaggtggctgtttccatccctgtttgctggcaccttctccacttaaattttggtatatcccttggttccactctctgtgttcttctcttgtgtatgagtgtggattttgtgtttgcttatcctgtgtggagtttctgagcttgaatctgttaagagtatgtcattaatcaaatttggaaatttttaagccatttttttttctttctttcctttccttttccttttttagaagcaggttcttgctttgtggttcaggctgcagtgcagtggcacaatctcagttcactacagcatcaaactcttggactgaagtgatcgtcctgcctcaacctcctgagtagctgggactacaggcatgcatcactatgcctggctatttttatttttttgtagaagtagggtctcactatgttgcccaggctggtttcaaactcgtgggttcaagcagtcctcctgctttggcctcccaaaatgctgagattatagttgtgagccaccatgcctggtcaagccattattttttcaatttttttttttctgcaccgcacttcttttcttctgttactcatgcacaaatttagatcttttagtattgtcctataggtctgagtcttttttcattttttaaaaaaatcctttttctgtcctgcagattggaaaatttttattgatttatttttaagtatactgattaacagtcttcttcattttactattaagcccatctagttagttttaaatttctagttattgaatttttaaattctaatatttttattttatcttctttatcttctgtttctttgctgagtcttttcactttttctagctgtctgaagagtcctagtagtttgtggttccctggagctctccgccttggtaatccagccagagaactggggctttattttctcagctctgcacatacttcctgtgactgtaaccatgtctgggtctaagtagtaggcagatactcttctcttgcttttttctttcttgtgttttagtcaaattattttacctcttattataactttgtttattattatttaccaacactttatatgcaaattgtagattattcagattgtatcttctaccagagtgttcactcttttctgtatgaggctgatacggagtgaggggagagcttattaccttaataaaaattaagggttaagctaggtcaaagttgatttttcagtgttgacagttcagttgagcctgtttgcttctgttcctagagcctgaacctctaggacttttaattgataccagtggtctccgctctgaaacagtccaccagaatgagggtaccaaactgacctcagaggtttccaggttaatgcagaggtttctagcttaatttctttctgccttcaaaatttggcaattatgtcaaaggggaaaatgatcttttgttttaggttttcagtttccaatgttactacttcagccttatgtaattgctaaaatccctactgttttccccctattgcccccttccttatcattatcttctgctaagcacaaagtgtgaattttcaggttccacatgtaaccagtataagtatatccttccccccaaaccccagtggaaatgtgccacggatccttatttttattctccactccttctagggctttcatttcttgcctattatgtttttagttgctcttttcttgttctgtctttgtaagcacagctagagtcagagaactttctgcttttggaactattttggttaacctctttaacttagcattcagtttcagaattcagcaaatgtgttttggggcaaactagctgtgtgttttaggtttgggaaatgtcaaattttgtttctctgtcttcatgcttctggctgcaaatgttggcaggtggaacaaaaagctgccagttctggcctgcccctgtgaacaggtctcacctctccggaaatttatccactttgtccttgttgcttcagagctctttggtaccattaacaatgtgacttatgatttatatggccttcctaggtgtcatcagtaggaatgttggctgtgatgcagtatatgctacccagaatcggaagttccatatattatgttttgataagagattttaggtgtttgagtatttctgatgagtgacattttttgaagtttgctagagagaaataattagctagttattgcttaactactctctctccatatctattacatatgtttctggaatatttctatggtcagagaaactcaggcccattataaaccatggactctggtagaaatagaagctgaaagcaaaccagtaagggaggtggagtgtataatttgtgttttggaagtacctgccggtggacttgggggtgatgctctaggtttaccatgagattactcatctaattttgagaaccactgtcctgcagtatttttcttttgcttacatatgactttttctttttatgatttaaaactaaatgtcaaccagttactatttaatgaaaatcataaattggtttagtgaaattttgttgtgttcttacaatgggtagaaacctaatgcacttatcatgcatctaaatttaggaataattcattttattttaatcatctatacttatatacaaaatgcttttcagcagtatatttgattatcttaggtacaatgatcttcatgttcagagttataaatgggaataattaaacctttaaacatattagagttgaataagggcttatctaagcaatacatgcttaaaattgctttcttatcaaaaaaataaaattggaggttcaagaagtgtctttaaattacaatccttatgaactaatagcttaaccttagttttgaataactgttactttttccgtcttttaaaaagatgcttaaaaataaacgcatgtcgaaaatgttattttggcttttagcaaactgacatttgagttttttaaaacctcactaaacatttgtggtaaaagatttcaaagctttgaattttacaatttgcctgtcgattccccccctgtgttattctattaacatttgatcttaataagtataacctgtttagaatgacttatgtttttaattatttgtttagatgagaagtttaaggaataacttcatcagaaattctacttggcagttatgaatgctttcttaaggaagttaaatttttggaatttcactgtaaagattttaatcacatgtcctattcttcatacatcaatctataaatgttcaaaaattgttaatgttgtttttatgctgtgctgatgttaacacaacgtgaggtcttctttcttctcctgataatatgctgagcgcacacacactctcatatgctcactcgctctctctctctctccttccctcccacccctgagtttgaaataagttagtggctttagtttctttgaaaatggaaagcaattgcccttaggtagaactggaaattgtaaagtgttggttttgtggacattttcctgttcataattcttgttatatcttatttataagtacttttattcatataggaataaatgattctatgttgaagggtataatcatgaagtcttttttattttttcgtgttagataaggagaaaaatgacacattaaaaattacagtgctatttgtgttttaaaatttcttctgtcgcttttgtattccttattgttctcttcactttttctattgtttttctagcttttcaggatacattttctaaatgcatcctaaatataacttacaatagttgccttttatttaaaagtaatacatttagtttccaaccacaaagtgtttaattctacatatttctatttttattttacatgatcttaatatatccttgattactgtgttgatcttctagtttttaggctgccacttataccatcaaaagccatttaaactggacttagaggataatgaatctaaattttcttatcttcctcaaaacaacagatacaattaaagtcacaaataagctgtaccttcagaattgctaggagacagaacatagtaagaattcaaatctcttataagcagagttataaacatcatattccaatattgattctgctgctttgtctgtacatttggagagcagaggtagcagggaggtttaagagactgaaaaaagggagaggggtgtatgaagtgtagatcagtaacaaacaccatcactcttgaaaagaaaaagtccaacagaggtcctagacctgtgttttagacaggtgggaggacagtaaattaatttttaaagacaaaataattatattgaatgaatttattgatcattttgttgaacagttagtataaggacatcccgtattatatttcagctttcataaactataagtgtttatgtcttatattttgtgttctttcaactttatcttaatttgcttctgttatttttaatgccatttttgtacatttgtttaatattactatattcatctttgttgtaattttttcctgtaataatgtaacataaataattataatattacaaagtttattaaatttcttccaatgataattaatatagtaggcttgtggtggaaaaatggatcaggtactgtccttccaattctgtcaggcttttgattgaggtgtttatatggccaccccgttcagacaaagaatgtcaaccaaaaggagaaagtaagaaggaatctataaattactaaaattcccatactttatttcctatggaaaaagtcatgtaaggaaaatatatagaagtttcccgtaaaatgtaataatatcataaactctttcatccttaaacacctgttagtcttgccacagcacaatcagttccctaaagataaatatttcttggtttgttagttggctacttaggagttccttttccttcttatgagttttcttctctcctgtatttcttttctaacaccatccaactggttatccaaactagcaacctcagaattttcatccctcttccacatcttacatttctttatcacatcctgtgtcttcaacttcggaatgattccttactttggtctcgtctctctatcctgtctttcgtatgagctattctaaaggcaggtggtctgcttctctttactctgtccagtgttatcatcatttttaaaaagtctgcttttcacactgttgctaaatagagtttaataatttctagtagccttcagaataatgtctacacttattagcctgatagttaccttttctttgtcagtttttactactttgattttgacctgcattttagtctgtgtttaactggtttttctgaatacgtcatgtttattgttttagcctcaaccctgaattttttttttctcccttaagtgtcaaatttcaattcagatgttaaactttccctgcctttttcattcagaatcacttctttctttgctcttgttttttattcagctttgttctatatatggttctttaaaaataattgtatggaaaattgctatgttcttttattataaaatgaagttgatttttcattacaaaacagtttatatgcttattgcacaatctaaacagatgtataaaagagccataattgttcctaatttggcgataactactgttaataccttggttgtattcttccaggttcttttcagtagacatgtatattgggtaattttgtttacacaaaaagattacattgtgcatcagttttcataaattagcacttctcatttgaaataacatggaaaatacctatcaatagatgtaaatctattttaaatctgtaacatttaaaaatgtttaacacttaagtagaagcaacacatacacatagtaaaactacatcaaggtggaaaattaaacgcttatttgaagacttctaattttgggaaattgactaattctgctattcttcaggatttctcaggccaaaattcagaacaaggctaaatttgcccatttccacctactattatttattctttctttatattatgctagagcttgtaggctctgtactaacacaagaaaggggaagaaaaaaattgtccttattcacaaatgataattatgtttaatttattaaaaacacataaatcattggagttaattaaatattagaaacttggctggaaaaaattgatataaagaatgtttctaaatatcagccacaaataaagattaaacaatatcataatagtattaaaacataggaagtatgaagtagtgatcagaataaaagatgtggaggctttgtggcaaacattatgaaactttgagagatactgtaatcatggattagatgatttaatattggaaatatatcacttttcccagcatagatatagataagtagtgcaatcactgttaaaatcctaacaagttgggctgggcatggtggctcacacctgtaataccagcactttgggagtccgaggcaggcagatcacgaggtcaagagatggagaccatcctggccaacatggtgaaaccccatctctactaaaaatagaaaaattagctgggcatggtgggatgcgcctgtagtcccagctacttgggaggctgaggcaggagaatcacttgaaccagggagtcagaggctgcagtgagccgagatcgcgccagtgcactccagcctggcaacagagcgagattctgtctcaaaaaaagaatcctaacaagttggtttttggagtttgacaactagttgtaaatttatatggagtgcaaaaaaccaagaacggccaaagcactcatgaagaacaacagggtaaggacacttgtagatagagtgtgtgtgtgtgtatgtatatatatgtgtgtatatatattatatatgagagatagttataagatactggggtttctaagtcagtccagtgtgttttttcttaacctgggtagtggttacacagacattcactttttttttttttttagaacagaaagtttctaagaatttatagcaccaagacattcattttttaaaaattgcacatttattttacttatcctagagaaatttataaaaaacaaaagtaaactataaacaccagttaaaaaaatccttttatattaactccatagagatgcaaatactgttaacagttaatgttttcaggggcctggctccatggcttgcacctgtaatcctagcactttgggaggctgaggtgggaggatcgcctgagctcaggagttcgagatctgctgggcaacatggtgaagcctgtctctaaaaaaaaaaaaaatacaaaaaaaattagccaagtgtggtggtgcatgcctgtattcccagctatttaggagactgaggcgggaggatcccttgagcccaggaggtggaggctgcattgagctatgtttgcaccactgcactccagcctggatgaaaaaggaagattctgtctccaaaaaaaaaaaaaaaaaaaaaaaaaagttaatgtttttagcttaccattataagtctaaataatgaatttgtgcttatttttaattaacaaacttatacaatgtctgtaaactctatactggaagatgaagaatgtagtgcacttacactgttttgcctttttattcttccttatatttgctttagtttgattttttattgattgactttatgacttcaacaatatatttaaaacctttttaaaaacttgatttttaacatttgagatatttatggagtcttctccatgaaagggagaattttgcatgcaatagtgtatgatgggcacttttaacttttttatggctttctttttcaaagtcatacaccactttacttttcttttaacctaattccatctttcttctgttttttttgggggggagaggttggaacatctccttagtaattttttccacataggaaaaaggattattaaatattactttgccttattaacctgataatttgagtacatattgaaaatttctagtttcaaaaatttcctcccttctcagcatagaatacattactccattatatttttagcatccggtattctttgagaagttaagtattagtctgatttttattccttttaaggtaattattatttttcacattatatgctttaaaggttttatcttaatatgagagattaaacaagatgtgtccaagtatggggtcctagtccctaatcccttgtaaaactgcttgatgtttggaaaaatctgaccatatttatgtttcaccttttttttttccaacatttctctcttactcttcataatctctattttccctttctgtatttcctgttaaacagatctcagaccacctaataaattctctacaccttttaatttttatttcatatttttaatttcttatattttctatctacttttttggtctttttaaaaatttcaacttttctatttttatcttagtttttacccatgcatattttgattgctcaggtaatccatccaactattgatttttcaaaaatttttcaataattgttagtgtacagaaactgtgtcattctctagctgcatcttttcatataattagataggtctgtttgtggcatctttctttccttgctttacaggcagtactgttatacttttgtttatttttatacataaaacatattttttgacgtttagtaagatgtggaagaggaaatgaacatatacttcatctcttttgaagtgtaaggtcttataattttcatacttcttgaactgattccaagggtaacattaagtgaaattttgtttagtttctatagaaaactctgttagttgtctggaatgaggagaaatacatgctgatttctgtatgtttgtagtaacaagtgattctgagactgggattctgattttgacttaaccagtttgccacgtgacctccatttggcaatctattaattattacttttactttctgtttagtttaatggccaattatggacagtctgttttaaattcttaaattcttatagttgtacacttatggaaaacatttcttaaatgtggaaatttagtatttttgttataagatatttcaattcatttattcaacatacttaaacaataaaaacattttactatttgtgttttaatactcttctgctcagaaaagtttactttgttgcaactcacagaaggtaacttacttttttctactgtgatttccttataggtttgatgaacttgtgaaaaaattcaaagtcgaatatcatgctggtggctctacccagaattcaattaaagtggctcaggttggttaattattttaaaagttaaaaggattcaaaatgattctagacccatgtctattttgcataattgtttccttttatattgtgttgctgtagaatagttttgttcatttgaattgggattttagtagtcattgcacatctaatcaaaagttattttaattggtatttctttggttattggtaagcttgaacttttaatgtttattgttcatttgtgtttcttcttaaattgtttcctttcactatcattttataatttttcatgttacagatttgtagaaacttcatattttatagatagtattcctttttattttataagttgaaagtatttattttttgttatgtgtacattaactcttacagtgtcttttactgtgccttagttcttaatgtaactttcaaagtttttaacgtaattaaactttatggcttcttcatttcctgcatgtcccccttacgaaggacgtttctgccacaagatagtagaaattgctctgtattatatatagatatctatatacataaatgtacattcatatattcatacctaaatatctatgtatagacatatatgttggtagatatgtatatgcatctatatatctataccggtgtatatcttttataaatctatatatctgtctctattcccatatcttccaatgagtaattgaataaacccattaggcatatactctttgagttaccagcttaacctaatcttgattgagagagttagtgatctgtttaatcttccagctttgaaagatatgaacaagttttacatacctctggttcttacctctgcagtttgaagttaactcaaaattctgctcattgcaatcatgtgtcagttctgcctacactagatttctttttcttttttattgattaatgctttccccttgaattctgattaacttcaagaactggggaagtggaaaattgacaaataaaatccagaatgatttcttttcaagtaactcttagttgattgagacatatagtatgattattccacatacttccaagctcagatttaatcatagttttcaaatattttgtaaaaatgaatctttaaggcggtcattaatatgaagtggcctgagtctttgtattggtcaattgatttgtattgtttttggtaaaacatcctggtggtcactttatgaacttccagagtaatagaaaaaggatgatttacggccaggcacggtggctcacgcctgtaatcccagcactttgggaagccgaggtggacggatcacttgaggtcaggagatccagatcagcctggccaacatggtgaaaccccgtctctcctaaaaaaatacaaaaattagccaggtgtggtggcatatgtctctaatcccagctacttgggaggctgaggccagagaatcggttgaacctgggcggtataggttgcagtgagctgagatcatgccactgcactccagcctgggcaacagagtgagactccatctcaaaaaaaaaaaagagagaaaaaaaggatgatttacttaagccttaatttatcaaggcacgttttgcattttgcagttttcagtcttttctcctgctagaactgggggtgatatggttaggctttgtgtccccacccaaatctaatcttgaattgtaatctgtataatccccacatgccaaggaagagaccaggtggaggtaattgagtcatgggtgcagtttccttcatgctattctcctgatagtgagtgagttctcacaagatctgatggctttataaggggctcttacccctttgctcggcatttcccattcttgctgccttgtaaagaagatgcctttcttctcctttgccttctgccatgattataagttttcagaggcctttccagacatgctgaactgtgagtcaactaaaacttttttctttataaattacccagtctcaggcagttctttacagtagtgtgaaaatgaactaataccgggaggctattagctgttcactaataaattgtctcctttcttggggatcttcatcagtttctgccttctaaaagtttattaattatataattaagttctccctcagctttctccctgatattagtctcataataaaacagtcattgcctacttttattcttttgcacttttttttttacaatatttcacattcattctaacaacgtattctagtagtggtttatttgttcctgtctttagcaaggtaataaaaggaatttgaagctttgggtaacttattctgtcagatcttactagtaatcatactttcatgtatcaagtgatatggcaaattatgtcaacaagaaaatgtccccaaagctcttaggtattttgatatgtcaaatcatgtttttgaagattttaatgaaaccataggcaacaaaaacaagtatggttgatatcttgtccaaacacaattctagatttatttgatacacagcacaaatgtaaattttggtaaatttcatttggtctgaacttcttcctaatgaaagtgaaaagttcttatctgctcaatatcctgcacagcatgtatataacactgctaaaaaggggtataacttgcttaagtttgataattgatgctttcttaatgaacacttttggttactttgtcagtttttaaaaaatttgtagaagcacttaatgtgagttttgacttgaaagaaatggaaaaacgttggcattgtgactcatgcctgtaatcccagcattttgagaggctaagttaggagaatcgcttgagtccagtagtttgagaccagcctggacaacatagtgagaccctgtctctaggaaaaaaaaaaaaaaaaagaaatggaagaaaatgacttccttggatatgtgcctaaaagatggctattattgttgctggacatagatgccctgcagtacaatattaacaaaatatgggaccaaaggaatgcccatctctgatttggcagtacattgagaatgagaatggaaaaagaagattatagtaaaacaaatatttttatgctgtttctggtttttttgtttgtttgtttgtttcaagacggagtctcactctgttgccaggctggagtgcagtggcgcgatctctgctcactgcaacctctgcctcccgggttcaagtgattcttttgcctcagcctcccaagtagctgggactataggtgtatgccacaaagcccagctaatttttgtatttttagtagagatggggtttcaccatgttggccaggatggtcttgatctcttgaccttgtgatccacccgcctcggcttcccaaagtgctgggattacaggcatgagccaccgtgcctggcctgtttctgtttttgaagaggccacaagtgggctagaaaaaacacataccaaaaaaatactcaaataattttatttgttcattatttattaatttttttgagacagaatctcttgctctgttgcctagactggaatgtagtggtgtgatcatagctcactccagccttgaactgctgcgctcacagggtcctccttcctccatctccacctccatctcctaggactacaggcacaccctaccatacctggctaatttatttgttgtagagacagggtctctgtgtgttgctcagattggtcttgaacttttggcctcaagtgattctcctgtgttggcctcccaaagtgcgaggattacaggtgcgaaccattttacctggctcaaatggctcatttttatatattaagagtgcttcagaactcaagtaaaaaagtcacagaaaagagcaatgaggttaaataaaactttttttcagtttctttactaaaactgtaacttacttggaatccagttttgacatcagaaattcaaattcaggtgttttaaaaccatttctgcaagaaagaaatttaagttaggatgatagccaatgtctttcagagtgttttaaagtgatggacattttgaacattgataagcctatataatgaatctgtaaacacaagggatatgattcataaagagctggaatgccaaaacctgcatttagctaaaagatagatggatatttttatagaactataaactaattcctatatctaaacacctattattgatagtaattaaaatcctaagtattctatgtttacatgcttttgttgagaggatatttagcttaatgtcattgcactggactgacatcaagaatgtgggcttgatgcatcagaggtataagtcacagtgaattttacctttgactgtattacgttttaccacacatacaagaaggattgacctaatggctctagtcaagtatagaaaggaaacataaaagtaaaaatattttattatttcttaggcaaaaagaagcatgcctttattctttttaattaaatattggtaaaatgtttaatccaactgtggttacgttatttttttaaaaagtgtgatagaaataaacaacagaataatatatgattttgaataagttcaatattagtttgctagggcagtcttagcaatttcagagactaggtggcttaaacaacaaagatttattttctcacagtgttggagtcccagatcaaagtgttgacaccttgattccttcagaggcctcgcttcttagcctgcagatggctaccctctttctgcctctttgcgtggtggtttctgtgtacatatgtacctctggagtgtctctgtgtgtcctaatgtcttcttataaggacaccagtcagattggattaaggcctaccttactgccctcattaatttaattaccttgttaaagaccctatcttcaaatgtagtcacattgtgagatactggggtttagggcttcaacatatgcatagtggcaggagggtctgtggaggggtgtttataattcagccgataacaactatgtgtttttaaatttttgtgtctaagtaataaaacatgaataagttaatttttggtagtgttcttttttgataccttcttccttttctttcctgtatatgttttagttacttttattatttaccatttgaattacaatgaacattctaaactcataacaacctaatttgaataataccaatgtagtttcaataatatacaaacactctgctcctttacatctccatcctcttcttatatattattacgctcattgattacgtctttatatattgcatgcccattaacatagatttgtaactattcttttattcatttgtcttttaaatcatataaaaataaaaggaattacaaaccaaaagttcagtgatagtggcatttatatttactatgtagctacttttaccagagttctttacttcttcatatggcttctggttactatcaaatgtcctttcatttcagcctgaaggactctctttagcattttgtgtagggcaggtctattgttaacaaactgtcttagcttgtgtttatctgggaatgtcttaaatagcccctttattataggatagttttgttggatatagaattcttggttaacggtgcttttcttttagtatgttaaatatgtcaactcactgctttttggcctacatggtttctgatgagaattagttcttattcttactgagaatcctgacttgtgaccagttgcttttctctcactgatttcaaaattctttccttgtctttgtctttcagcagtttgactataatgtgtcttggtgtgaatctttttgtgtttatcatgtttagagcttattaaattcatgcttcaagttcatgcttggatgtgtagattcattcattttatgaaagtcaggaagttttggaccattatatcttcaaaaatttttttcttttattttctctttgttttccttctggcattctcataattaatatgttggtctgtggtgattgtttagtgataaggattctgattaaataagatagaaaaaaacaccatggtgagtaagcaaagcagaaatagaaccccactgttttaactagtaacctcagcttgctttttttaccggagatttttctctcatcctgagaaaacttcaatttttacttctctaaatgttagagattttgagtagtgtttcacatgctttcttcacttcttactgtcttcttcaatttgggagtaattgtaggttgtcagagagagtgtcgaatatgcatcactttaaatacagttatcagtaaatggactctttcattcatgcttcccagagatgacagttttccttggtgcctagatacctttttgttccttggagattcatagtattatgtgactcattgaatttttcagaagcctgatggtgagcttcgtgaggtatttctatttaagttgtaagttcgcttgtttttaagcttcctgcaatttaacttacctatagtatttttaaatttattttaaaaatgccatcttggggtatattctaggcatctcaaaaattttaaataccatcttatcctttgttaactggaatataagcaggtaatcatttgaatcattttttttcctgtaattattataacattgaggctatatggatttttttttctttttttaatttgaggcagagtcttgctctgtcacccaggctggagtgcagtggtgcgatcacagctcactgcatccttgacctcctgggctcaaggaattctcctgcctcagcctcctgagtagttgggactataggtgcacaccaccacacccaccttatttttaacttttttgtagagattgggttttgccatattaaccgggctggtcttgaactcctgggctcaaatgatcctcaagacattagcttggtctcttctcaaattagcagatccttatttctgtcttataatttctaatctgcttttataattattgacttacattcaatcttccagtttttcatgtctcttccaattagataagcctccatatttgtatttaacttccagtaaaattttaaccatgttgtttcatttttaattaaaatttaagaggactgcctaaatgccagtgtgtttatgttgtatacatctcggggcatgcttttaagtgttttcttgatgtaaaacatcacataataaactagtgttcataattgtattttaaagctttccaaaattctatgtaaaatgagtttctaaaaacactaaacaaaagaagttttaggaattatgtttgaatgaaatagaaacattgaactcaaaattgtaaagctgatatttcaagaactaccaattagtgtaacattactaattgagttacagtatttagaagttaaaactgatgtaaatcaaaggactcatgttgtttatctattttgaatccttttttgaaaaaagttaatctttaaagtttttctgtattaaaaaaatctgattatctcttgtgacctattttacctagaaaagctagttagaggttaaaaggttttttatgagacatacttctgtgcatcggaacagtccagatgtaaatttaaaaagaagaaatgacaatgaagtgatcaaagagaattctgtgttcaaatgctttcacctggagcagttgtagaaatgtcagtagcacaactgtatttataattatagcaggatgtggcagatggtgatgcaacaccgtctcgtcaattctttgtgtcattgaagaaagtagtaagtattaattctgccaattttatgattaatgaataattttaagtaacacaggccctacgaataaggttgactgttcaaattgtgatacctcattatagtttttaaagtttaaatatgaattaatactcctctttgcctttctgttctctttccttttcaaattaggttgttaagttttcatagctaaaataagatgaaggaagcagtggcttgctgtcctcaattatatttttgatgtgtttgtgaaattattataacttagatcagattctttaaagaaaaatcagtatttcattttttcctttcctcccttttctccctctctcctttccttgtctctctcctttcctttctctctcttcttccctttacccctcctctccccttcccttctttctcctcctcctcccttcctcacatctctttcccttctcctcctacccttcctcttccctcccctcttcttcctttcttcctactttgttttatgcattatgttaagaaattgttttactgctattagtgataacatgcttttagttctgtcttagcagttatggttgtgctctccaggataaatctacacatatcacagttatccacttcataaaagaatgacatatctctactcttgtgggccttaatgtcatgcagtgtttctgggtatgacattaaacatgggtacaatttgaaattgtatttttctgtctaaaagcaaaacaaagcttcatcaagaaatactacaagcagtgggacctaatttcatcaaggggataaaactctattcctttttattctattttggaattggaattcagaaacatttttttttggtcctatggatggtatattcacttatttgaaatgaaaattgaactcagacttttctgaaagagtctcatttgttaattggttgacaaggatggtctttgccatttaaatgatacagtggtactgtcagctgtcattgttcttgaaagcaaagaaaatatttaattgtattgattttctgacttacgttcgaattaatacacatttccttcttctttaagcaactttattggaatatagttcacgtacaattcacctgtttaaaatgtataatcttgtggcttttagtgtgttcacagatctagctagctgtgcaaccatcaccacagtcagtttcacaatattttcttttcttttcttttttttttttttgagatggagtctcgcactgtcgtccaggctggagtgcagtggcgcgatcttggctcactgtaatctccacctcccggggtcacaccattctcctgcctcagcctcccgagtagctgggactacaggcacccgccactgcacccggctaattttttgcatttttagtagagacgaggtttcaccgtgttagccaggatggtctctatctcctgaccttgtgatccgcccgccttggcctcccaaagtgctgggattacaggtgtgagccaccgctcccggccccacaatattttcattatcaaatgaagaaactctataaccattagtagtcattccccatttctctctcaccccctcatcttctgtccattcaaccccttggccccagacagtcacttatccagttttgtttctataggtttgcctattctagacaattatttttatttttggagatggcatcttgctctgtcttcgaggctggagtgcagtggcacaatcatggctcactgcagcttccaactcctaggcacaagtgatcctcccacctctgcctcccgagtagctgggtctataggtatgtgccaccatgctcagctaatttttaacttttaaattttctgtggaaatggaatcttgctttgttgcacaggctgatgttgaattcctgacctcaagcaaccctcctgcctctgcctcccaaagtgctgggattacagttgtgagccactgtgcacagcctttcaccaattgtcaaaaacttattcatgtatgtgattgtagattctttgaccaacatctctccatccttctacccctctaattacccaagcctctgataaacaccattttactttctccttctatgagatcagctttgttatagttcacatatgagttgagattatgtagcatttgtctttttgtacctggattatttctgttaacaagttattctccaggttcctccatgttatcacaaatgagaagattttgttccttttttttgtggatgaatagtattccattgtgtatatatatcgcattttatttattcattcattcattgcctgataaactcttaggttgattacatatcttggctgttgtgaataatgaagcagtaaatatggacgtgcagatatatcttaatcatttccactgaatatgtacccagaagtgggattgctggatcacatgttgtaccgttaatttcttaaggaacctccatacctgttttccataatggctgtgctagtttacattcccatcagcagtgtacagggttcccttaatatttcgggtactatagccttttgtaatatattttgaagtcagatagcatgatgtgtctttgtcatttttgctcaagattgcttttgctatttgggatcttttgtggttctatatgaattttagaattttttttctatttctatgaagattatcattgtcatttgagagggtttactttgaatctgtagatcactttggatagtatgggcattttaatgatattctttaattacatgaatgcaggctgtcttttatttgtgtcttctttaatttctttcatcagcgttttatacttttcatcttagagatcttttatctccttggttgaatttatcactaggtattttagctatttttatagctattttaagaggaattgtttacttgatttttgtttttttcagatagtttgtggttgatatatagaaatgcttttgtatgtttattttgtgtcctacaactttactgaatgtgattattagttctgacagtattttggtacattctttagggttttctgtgtatgagatcttgttgtcttcaaacaagaacaatttaatttctacctttccaatttgtatgccttttatttctttctcttgcctaattgttctggctgggtcttctagactatgatgaatagaaatggtgaaagtatacatccttgtcttgttccagatttcagaggaaaagctttcaatttttccccattcagaataatagctttggatttttcatatatggcctttattgtgctgagctgcattccttctatacccaatttgttgataatttctaacatgaaagaatgttgaattttgtcaaatgcattttctgcatctattgaaatatggttttttcctgcatttaatgtgatatatcacagttattgatttgtgtatgttgaaccattcatatatccatgggatgaatccacttgatcctggtgaattatcttgttaatgtgctggcttttttttttcttttttaagacagagtctctctctgtcacccaggctgaggtgcagaggtgctctacctcctggattcaagtgattcttccgcctcagcctccctagtagctgggattacaggcaccaaccaccatgcctggctaatttttgtatttttagtagagaggggtttcaccatgttggccagggtggtcttgaactcctgacttcaagttatttacttggcctcccaaaattaatgtgctattgaatttggtttgctggtattttgttcaggatttttcttctatgttcatcggagacattggcctatagttttcttatttttgttgtgtccttgttaggttttggtatcagggtaatgctgattttgtagaatgagtttagaagaattctttcctctttattttttaaaaataatttgagaagaattcgtattagtttcgctttgaatatttggtagggtgtgttggcttacgccagtaccccagcactttgggaggctgaggcagaacttcaagaggccaggaatttgaggtcaacctggacaacatagtgagaccttgtttctacaaaaaaaaaaaaaaaaaattagcttggtgtggtggtacacacctgtagtctgagctacttgggaggcctcttgggaggctgaggcaggaggattgcttgagcttaggaggtggaggctgcagtgaactatgatcatgccactgtactccagcctgggcaacagagcaagaccctgtctctttaaaaaaacagaacaaaaattttggtaaaatacagcagtgaagccatcaggtcctaggcattttttcttttttctttgatgggagactttttatcactgatttaatctctttacttattggtctgttctaattttctatatcttcgtaattaaattttggtagattatatatattcagaaacttatttcttctaggttttctagtttgttggtgtataattgttaatgagagtctcttataattctttatatttctctgggatcaattgtagtgtctccttttttgtttctcactttattatttgtgtcttctcctttttttcttagtctagctaaaggtttgttgcttttggctatcttttcaaaaacctaattctttgttgtatttatcttttgtatgttttttaggtctctatttcatttatttcttctctttattatttatttttttctgctaatttggagtttggcttgttcttgtttttctagtcccttgaggcgcaacattaggtttatatctttcctctttggggatttatgtgttaattactataaacatcacttttagacctgcttttgctgtatctgataggttatgctttttttccattggcattgtttcaaaaaatctttttgtttctctttaattttttcattgaccatgttgtttaatttccatgtatttgtagagtttttgattttcctcttattattgacttctagtttatgccattgtgatcggaaaatataatctatgattttgaactgaaacttgttaagacttatgttgtggcttaatatgtactctatcctgaagcatgtttcatgttcaattgagaagaatgtgtaatcttcagccgctggatagaatgttctgtaaatgtctgttaggcctatttggtcaagagtgcagtttaaacctaatgtttcttttttggttttctgtctggataatgtttctgttgcttaagtggggtgctgaagtttcctactaggtagaggatcagaaaaaataaatattacatactcagcttagtatctgggtgatgaaataatctgtacaacaaacccccatgacacaacctgtacatgtaacaaacctgcacatgtaccgctgaacctaaaataaaagttaaaaaaaaaagttgtctactatgattgttttgtactctatctttccctttagatttattgatatttgcttatatcaggttattttaatctagtaacaacttaactttgattgctaaaaatgtttaataaacactgtgtactttaactcctctttttctctcacattttgaatttttttctgagatacagtctcactctgtcacccaggctggagtgcagtggtatgatctcagctcactgcaacctccacctcccgggttcaagcgattctcatgcctcagccacccaagtagctgggattacaggtgtgcaccaccttgctcaggcaatttttgtatttttagtagagacggggtttcaccatgttgcccaggctggtcttgaactcctgacctcaagtgatctgcctgcctcggcctcccgaagtgctgggattataagcatgagccaacttgtccagccacatattttgaatttttgatgttacaacttacaacttttaaaactgcatatcccactatcaattgttgtagttataattatttttaatagttttatctttaatcttcatattaaagatataagaggtttacatactatgcttacaataggccgaatagccacttcccactcattttttccaccatagaaaacttgcatccaggggacttctgcatatgtgggcttaggggaagggtgttgcagtcaaagcaccatttcccttactgtctgatatggtttggctctgtgtccccacccaaacctcatctctagttgtaatccccataatccccacatgttgagggagggatctggtgggaggtgattggatcatgggggtggtttcccccatgctgttctcatgatagtgagtaagttcttacaaatctgatggttttataagtgtttggcagttcctccttcactctctgtctttttctcctgccaccatgtgaagaaggtctttacttcccctttgcgttccagcgtgattgtaagttttccaaggcctccccagtcatacagaactgtgagtcagttaaacctcttttctttataaattactcagtcttggatatttctttatagcagcgtgaaaatggactaatacactgttctcagatttttctcagctctgtggtacaatgagacaccatcctgagttccaagagatccagggtagtcgtcttgccactgagaagatactaattgtgacaagttaatgggtgcagcacaccagcatggcacatgtatacatatgtaactaacctgcacattgtgtacatgtaccctagaacttaaagtataataataataaaataaaataaaaataaaataaaatctaatcttctgtgcaggcaaaaaaaaaaaaaaaaaaaaaaaagaaattctatagggtgtggagaaccagacaacaattcctacccttccattttgcaagcatcactctgccatattttttaaagaataatgtttttagagtatttgtgttctttggtacttttgctgctgagattcttgggataacaaagtaaaaaaccaaatagtctagattgtaacataccacagtgatttggggcaagaaggatgtgcagtagaattaagccaagctgggcaagtatgaacttgggactgtcaccaaactctgtctcattcttttctccttatttaattctttccatatcaagcatttacaacccactatgtagaggtccatacaccttggcttatagacttcacttggtagttactgttgcccacctatctattaaccagaattttcatttaaaaatctctacataaaaattagcagttatgcagtggagttttcaaataaggaagaagattggttggatggatggatgttaggtgaccactgggaaactatggttttagaacgagtagctggtaggttgcaggtggcatgtattttaatacatgtagcagaaaactgaaaatttatgagcattttagaaattagagctctgtcaaaataagagaaaaacttagatttaattttataaaagcagtactaatgactttatgaagatggcatatgatttatgtatgtatgaacaattatatgtatcattaaatagatcagataaattttttgttcttttaagaataataggccagatgtgatggctcacgcttataatcccagcactttgagaagccaaggccagaggatcagttgagctcaggagttcaagaccagcctgggcaacatgacaaaaccctgtctctacaaataataaaaaaaaaaaaattagccaggcacggtggtacatgcctgtcatcccagctagtcaggaagctgaggtgcaagaattgcttgagcctgggaggttgaagctgtagtgagccatgattctgccactgcattccagcctaggcaacagagctagaccctgtctcaaaaccaaataataattttttaaatatttattatctaatgtgggtttttgctttatgttacagttgtcacctactccaatatgaaaaatgagaagaaagccaggtgtggtggtgcatacctgtagtccctgctactcaggaggttgagatgggaagatcacttgaggccaggagtttgaggttgcagtatgctatgattgctcctgtgaatagccattttactctatcctgggaaacacagtggcatcctgtctcttaaaaaaaatttttttttaaagcatgttcacaagttctttaatacttctccattgaaaaggtagaacctaatttcccttctcttgaatatggcccagacttagcgacttgtttctaataagtagaatgtatgtaatgatggtgtgctatttctgaggctagatcattaaaggcatcattacttccatattattttttcttgggacacccataatggggaattcaactgctatgttcttgaggatacgcagtcagcctttgaagacacccacatgggcaggaacataagccttccagcggcaaccagcaccaatatgttggccttgtgagtgcagccagctccagtcaaatcaccagattactggagccctgccttacttaaccgactacaacctgatgagacaccccaagagagaactgttccactaagctgctcccaaattcctgacccaccaaaactatgtgagatagtatttcttatttatagccaccatgttttgaagcaacaatgactattaaaataataaaataactttcagacattgtttttaatccctcttttctgtagtccctgtactttcccaccccaatttatatttcctgtttctatttgaacttttttcttttttgttttcatttcttttatacataatcgttttgagctataagaataatttatgccaaaaattatgcagctaatattttacacccgtattgtaaccagtatactggtataaaactagataataaactactatggctgtgttttgcttcttacagatggaaggaaatgcctaaaatttaattttatataccacaatgtgttttgaaagttttgaataattttctggttttgaaaacctgttttgatttttttttctcacaaacacgatattcttaagtaaaatagagtgatttatgattaatagaaataatgaagattatgcaagttattttacttcaattgaaatagcaaggccagaataatttaatcatgttttccagaagaataataaaatagaatcagtggcaatactagtaaacattagtctacatttctatttatttatttatttttttagacggagttttgcctttttacccaggctggagtgcagtggcacgatctcagctcactgcaacttccgcctcctgggttcaagtgattctcctgcttcaggcctcccaagtagctggtattacaggcgcctgccaccacacccagctaattctttgtatttttaatagagacgggatttcatcatgttggcaaggttggtctcaaactcctgacttcaggtgatccacctgccttggcctcccaaagtgcagggattataggcgtgagccactgcacccagccaacatttatatttctttaacttcatatcatttgctgtagttagctggatcatatttcttaaattttactttatttatttatttttgagacaaagtcacgctttgtcacccaggctgaagctcagtgtttgcgatcttggctcactgcaaactctgccttctgggttcaaggaatcctcctgcttcagtctcctgagtagctgggattacaggcttctgccaccatgcccaacaaatttttttttgtattttttgtagagacagaatttcaccctgttgaccaggctggtattaaactcctgacctcaagtgatccacccacctaggcctcccaaagtgctgggattatggccatgggccactgtgcccagacaaattttactttcatagtaacattttgcaaatgtaaaaattttataatttgattagtaatgtcagactctatcaaggtgatgctctcttaaaagttgttgatgataatattagatgagagatgtatgtagttatgaaagaccctgaaatgattgtatttttttatttctgtacaaagtttactcacatttctatgtctagccatagctattctaagccatagcacaaagaactgtattgtgatggtgagactataaaaaggtaaatttagagaaagcttccagatctgctctagaatttattaccatctggtctctttggagactagtataattattcatgggaatgttttcaacacagaaaagcatggtttgtgtattggcagaaagtaaaaagtaccagtggtttaaaccatatgtagcttttttagagttaggcaagggaaatgaactgaagacctaattgagagtcatcagtagtgatgcaatttgtgtcaattttgtcagaatctgttcataatgaacaaaatattgcacaacaagaaaaactgaaggtattagaaatataactccatttgaagagtattactttatcttaatttaaccaatgaaatgtaagatggtgtcagctaagtatttgtgtaaatctctgaaataacataaggaatatatgtcaaattttgatgacttttaaaaatgaaaacactcatgttaaaataattttaagcttgaacactggaagaatgtcttattaaggttatttttcttaaattgaatatgaatgtattattttagatcattttagatgtggcatggacttactactgttcctcttaagaagcagaaatattttacagtctttcttaagcttaaattgattttatagaaaaaggaaaaaaaaactaaatatcttttcactttccattctaacagttacttggagtctataaaaaatgagatgacaaatcaaaaaattgaaatcgtctattttttcagctattttaaaagaaaaatgcctagtgggctgggaatacacaagaaatttaaatttgtgattgagaataagaaatgcatttgtggttttaaaaaagaaataccagcatgtcacattaaaaatatggcatctacagtattgtacaaaggaaaatgtattacattaggagggggtatgttgtactttatttagagaactagtgcagggatacgaatgagaagtataacgccatagaaggcatgagcattagtaatccagtcagagaggaagaattttgctgcctcccatgtaacataaaacagatgttccattctattagaaccttactaaaatgagagtttagatcattggtcaataggagaaacatgaacaatggcaatttaataattttgagggtttatcttatttgtgagttaatatccatggtggggagtatgaagggatgcctgccaaatgttattttatttttgatatcttgattgagagagctgaaaggcaacagtaagctatactaatttttaatttattgttttgcaaatttaatctatttttttctcaaaaactgttgtaagaaaaaaagatttcaaaattataagtcctgatttaatgcttgaataggtattgaagcatatctgaaagtataattaattaacctcaaatgaatactgtaaacattaagtagttggcaactgaaagtagacgtatgcagaaagggacaccagggatggtaccacagggtcctgggtatatttttgtttttttaagggaagatttacttttttctagaaaagaaattcttttcaaataaatttatttttcaaaaaatactttttttcaaaagtattttttccattttaaaattaagttataatttatatacaaaaaagtgatctttgtagtgtatgtttctgcaagttatgacacatgcacagtctagcaaccagtatcagaaataagatagagaatagtttcatcacctcaaaactttccctgtgtcccctttgtagtcttcctttcccctacttcagcccttggcaatccctgctctgtttttgttgacagagacagttctcctcacttgtttgtgaagactgtaaggttctgactgccctttttcctgggacatttctcagggttatatatgcagctgataaacttgagacatgagataacatctgttcccagacaaaaagcaagcttatttactgcttgctataaaattggtggattccctgagttcagtgcttctcatttgctgatgcaaactcactacaagcatagcatccatctgagcatccccaaaggacttgggatgaagggaactgatgcaaatgtgctgatgttcttctgttttgtcataagtaatgaagtgttttttctttgactgaggagtcttgtgtcttctgcctgcatccatgaattagttaagaggcttttgtgttagcttttattaaatagggtaaaatcaaatcccagtctccataattttctgtttgtatagttttgccttttccggtgacttgtattgagggttcctgcttctggccaacaacctatgagtgattttttaggtctgatcataaggcatttacagaggttttcctggcaggcttcatagggggagggctggtctccagagcagacttggtgcaaagcttttatagtctctgaggggaattgcagtcaaggacccagccatcctcttatacatatctgcgttcctagcctaggtgccttcattcagaggcctctttatgtggggcttttggggaggctttccttaagtgtctctgtcaagactttattggggaaaagaggggaagacacttaccaactctttctctactatgacttgtacttttctgtttctaacccttccctctctagccttcactcgactcctgggtctgtaaaactgccagaatcttttgttgggggttccctttggcaatgatgcaaccctcacatttgtgctggtctacctgccctgtgaccaatgtgccatgccacaggggaaaatggaatggggggtagctggcactttctccaatttagcctcttatactgtcacagtgattacagacctattctttattttattttattttatttatttatttttttggcttgttgccattggctgtgccaaaacgtggcagcccagctttctccagctctcctgaggtactgatacacacaaatggaatcatgttgtgcatagcctttgaatctgactttcttcagttgacgtaagttcatcttagattcatccatttgctttgtcaatagtttttaaattttaatggctgagtagttttctatcatcgtgatgtactgcaccttgtgtctctatccactctagagggatatttgaattgtttctggtgattatgaataaagctgctaaaaatatttatacgtttttgtgttaacataaattttcattttactagatgtattgccaaactcctttccaaagtggctgtgccatttcacattcccactagtaatatatgagaggtctagtggtttcacatcctttcagcacttgatattgtcagcttttattactacatcaattgtaagggggagaggagcatctcattgtttgtttctacttccctaattatgtgaagcacatttttatatgcttatttgctatctgtatatgttctttgaagaagtatctcttcaaactctttgccttttttttaaaaaaaattgtgtttatttttgttacagagttttgagaattctttatctgttctgcagacaagacttatcagatgtgtgatttgcaaatattttctcctagtgagtggcttgtgttttcattttcctaacaatgtctttcagtgagcagaagttcttacaaatttatgtacttttaaaatggattatgcttttgtgtcatataagaactctttgcctaatccagggtgagaaagatttactcctatattttctactagaaatttcatagttttactttttacatgtagatctgtgatccattttgagttaagttttgtgtatattgggtgaggtctgtaacagagtttttgattattgttttttgctattgttttttgctttggcatatggatatccaattgatccattactcttccctgaagtctatttaaatctctttaattgccattgtacttttttgaaaatcaattatgtggttgtatatctatgttccatattctgtttcattgatctatatgtctcttctttctccaatatcatacttctctgattactgtagcttaatgtgtttgttttttttgctgtctaatcatggaagttgaatttattgcattttacaggtcaatattttttgtagttgtagacgtctgtaattttgcactgttaattttaatgtaatggacatattagaaattaggttttcaatatgcaggggaaatgctgttaatttacaattgaagagagttatgaaataataataaatagaaaaagtaaatagagaaaggaaagtacagtcatcccttagtgcccataagggattggttctaggaccctctgtggataccaaatccatggatactcaagtcccttaaatggcataatatttgcacataacctatgcatatcctcccatatactttaaataatccccagattgcttataatacctaatacactataaatgctaagtaaatacttgttatactgtgttatttagggaataatgacaagaaaaaagtctgtacctgttcagtacagactcaacaactatccatttcccccacttccaagtatttttgatctgctgttggttggttggtctgcagatgcagatcccatggatatggtgggcctatatatatgtcttatttattgtcactaccttttgcttccaagtattttttatttttaatgagagttattttgttgtggtgggtggtttaacatacataagttttcccagcagcagaaccctgaagcaaggattttagaacaaagtctactttggagacgtatgtaacaggcaagaattgatgcaaggaaagcaaggcagctaatgaagacttactaactaaactaacacaataggttgctggagctttatcttgtgggataattctgggaaagtcagtgtcaaatttagtttcgggactaactcacctgaagtgtgagagagtgagtatatttcctgttactggttgtggactgccatacagaagacattgcacctgcctggtgctgtggtgggcagagtagcattcagccattcagaggaaagccctgagggatacagaggaagatactggctattggaagtaatttggaatggtgggaaagggttaggtccaaaggatactgtacagacactgacattatctgactcatgccttgtgaattttaagtgcctttcctgggttatcaaagtgaatagctttaatcaaatcatctctataaagacatttctaagtaaattttctatacttacactcctctactttttattactacagctggcttcattagctttttgtatattaatctgtgttgtcctactattagctagaagagcttactaactgtgagcttgaagatattgtatattccctcttcggatgatttttttttttttttttttgagtcagagtcttgctcttgtagcccaggctggagtgcagtgatgcaatctcggctcaccgcagcctccgcctcccgggttcaagtgattgtcatgcctcagcctcccgagtaactgggattacaggcacctgccaccacgctgggctacaaatgtatttaagaatcttaaatgagctgtgattgcaccactacactccagtctgggtgacagagcgagaccctggcttcaagcagtcctcctgcctcagcttcctaaagtgctgggattacaggcatgagccactacccctggcctaaattccttttctagcctctatacagaatttctaggataacaacaacaacaacaacaacaaaaacttaaatgataaaaatgaatatataaaatagcaagtaagccatgtaaaatattttcaatattcttagccattagagaagtgcaaattaaaactataagatactgctgcatacatatgtggatagcgaaagtaaaaactggtgagaatacagaatgaatggatttctcatctgttgctgataggaaaatgacacagccactctggaaaacagtttggcatttttaataaaattaaagataaatattccatatgactcagcaatcatattcctgagtatttaacatagaaaaatggaaatttatgtatatgtaaaaacttgctacacaaatatttacatcagcttaatttgtaattgcctcaaactggaaagaatccagataactttcaacaggtgaatagataaacaaactgtgatatatctatcgaatggaataccaagctttgtaaaagaataaattactggtacagtcaacagtttccgtagatcttaagttcatcacacgaagtaaaaaaaaagctaaactcaaagtgttacatactgtatgattccaattatatagtattacttaaatgaaaaaaaattagtgttggaaaattaacctgtcattccaggagttagagataatgtgggagaaggggataggtatgactataagggagttgcaggagagggcttctttgtggtgatggaatagttctgtgtcttaattgtgctggtgagtacatgaatctttacagctgataagattttatagaatagtacacacacactaagaacaatgcatgtaatgtctactttggggagctttttttaaaaaaatttcttttaagagacagtgtcttgttccatttcccaggctggagtgcagtggcacaatcatagctcactgtagcctcaaacacctgggctcaagggattctcctgcttccagcctcccaggtagctaggactataggtgcatgccaccatggctcgctaatttttttatttttattttttgtagagatgggggtctcaccatgttgcccaggctggtctcagtctcctggcttcaagcagtccttctgccttggccttctaaagtgctgggattacaggggtgagccactgccctggcctaaattccttttttagcctcttcacagaatttctaggataaccaatataagtaaagtagatgttatttttaaaatgatccactttatacactaaattaaaagacagtcttgatttcttcaaaattctttgctgtgaagtgaaacgtttggtaatcatatatcttgttgacataaacatacagattcctctgcatgtaacattcttttccttcactttaccaatttgtgcccatttcacgtatctcagcctatatccctttttcatgatcatcttacctctgacataactctttcacccaccaaatctgtgtttggtgtcatttctatgatggtcccatacaaagctggactcattttacagatgcaaaaagtgatgaaataatgaacaagttaatggcccaactgaaactgtggtgttggacataaactttagaataaatcctaaatcttaagtgtgcaaataaattattcaaaacatgagattacctaacctattctagtgatatttaacagagatatgtttgtaactggtggaagaagaatcactccctaggtacaagatcaattactgttcattttattcacctgaagataaatcactttcacagattttgcagactacttcttttcctgaaaaaatgatttattaaagtggaggtttctttactatatcaacactggcttactcttttctttataatacttctatactgaaagaagccagaggccaaaagtagtcttgtttgtgctgctctttatttcattgttatttttaaaccagatgatgaaattcccttccattttgaagggccatttttcatgtacataggagggaatttaaactgtttgagttaatattaacatattctattactataaattggttttagtttgattttaaaatagcatattaatttacatttaattttagtattcaactctgatcagaaaaatagtattttggatgtaggggtaaggaaaaggtgtgaaattccagttaaaaatctaaagtactgtgtttattgtttcattgtgtgtctgcatttagtattgtttgtatgagaaaaagtcagttgtttccttatattcccatataatttttgagtagtatgacaatcttcatttatatacctgatgacttttaatttttaaaatgttgtctaaaccaggtttcaggtgatatatcttgcttcctaatttgacaactctgaatattactattgaaacttgtaagcaagtagaaattaaaatgaagccatacatagcatttgctttgattaaaaagaatagaaacctagactgttttggaaaattcagtgtatatttcagtgtatatatattatgtgtttatatattgacagatctgggcatcagaatagagtcaagaaataacataaatagaaattcagtaagaacacatatgaaactggaaaccagtggaggaaaactgaggaattgctgtttgtgagagacttatttttcactcagtatacttttttttactgttttaattgtctatatagcatgctgcatattaccaattttaaatacttaattttgaaagattaaaatggctggcaaatttattgcccatttgcaaagtacatttatatcaggcatagtacaatatgtagaatgttattggaacattggaacattgtgtctgaaatacttttttaaaaacctcataaaatatgaaaatacttcttaatgatttcaatattaactctattcattagacatctatcattatcctttatgtcagaaacttagagtgaaatcttattagcttgattgaagaacacttgttctcatttcattgtgctatagttaacattcaaagttaaagttatttttcttctccttgatagtatactataataagtatattcaaagtgatgctctagatttgtttccttcacatttagacttgcatttttacaatgtttatactaaggtttcttacacttgccatagtatatctgtgcggtggcttactcctgttaatcccagcaattagggaggcccaggcaggtggattatgaggtcaggagtttgagaccagcctggccaacatggtgaaaccctgtctctactaaaaatacaaaaaaaaaaaattagctgggtgtgttggcgggtgcctgtaatcctagctactcgggaggctgaggcaggagaatcacttgaacctgggaaggtggaggttgcagtgagccgagatcctgccactgcactgcagcctggacaacaagagcgagactccgtctcaaaaaaaaaaaaaaaaaaggatttttgcaatcattaacttacttcttgctgtctgtttttattgtctttggctgtccttcttaacttcttcaaagatttctagtatatttacactccttaatcctaaatccagtgtatgttggctctcatggtagttttccatttcatgtacttgcttgtataatataaatccctgttcttggtgttttgtgtatttatttatttggctgccattgtattgaaaattgtcttgacaattcatttatgaacatcattagtacagcaatatgtaattcaaaaccagcatgctcaaatttgtactattctggttagttattgctatgtgtgtattttcaaatttttaaagacttagagaatagtaaaacatatacttagcacaaatgatatcacttcttggtacctttctgtgagtccttcttcccataaggaaattaaattgttctttgttttcatgctaagtagcatgaaaaaaaagctttattgagataaatcaaatttagagcatttttatcacctcaaaaagagcccatatacattagctctcacccactcaattatccctccttggctattttgggtccattgcaattccaagtgaattttagagtcagtttgtcaatttacacaatgagtatagcttggattctgatagggattgtgttgaatctctacatccataatgggtaatattgccaatcttaataaaattttccatgaatgtgggatgtttttccatttatttggatcatctttaatttgttgcaacaatgttttgtagttttcagagtataaattttacactgtaaagaaaacttattcccaaatattattttctttttgatgctattgtaagtggaattcttttcttaattttatgttcagattattcattgcagatggcttagagatacaattgtgtgtggtttttgttgttttgtttttgagacaggctcatgctctgttgcccaggctgaagtgcagtggcacaaacatggctcactgcagccacaatctcctaggcccacctgattctcctccctcagcctcccaagtagctgagaccactagacatgcaccaccatgcctggctaatttttaattttttttgtagagacagagtcttgccatgttgcccaggctggtctcgaactcttgggctcaagcaatcctctggccttagcctcccaaagttttgggattataggcatgagccgctgtgcctagctcagtttgtgtgtgtgtgtgtgtgtgtgtgtgtgtgtgtgtgttttaatattgatcttgtatcctacagcctttctgaacttacttagctctaatattttttagtgggttctttatgattttctataaacaaaaccatgtcatctgtgactatagttgtgtttccttctttctttctaatttggaagcctttaactattttcccccttccttaattgctgtgactagtagttgtaatgtaacagtgaacagaagtggcaagaagagatgtccctagtcttgtttctcatatagggggaaaatatctaatcattcaccattaagtttgatgtttctctgcagttttcttagatgccctttatcagattgaggaagttactttctatttctgtttttttttagcgtttttatcttgaaacagtacagttgacccttgcacaacatggcgattgtgggtgctgacccactgcatagtctaaaatccatgtataacttttgattctcccaaaacttgtcaattaatagcctactgttaaccagaagccttaccagtaacataaagtcaattaccacatattttatatatgtatcatataaagaatatattattaagaaaatcatgagagaaaatgtatgtactatttattaagtggaaatgtttcgtgagaaaagtcatcattgtcttcatgttgggttggctgaggaggcagaggaggaactggttttgctgtcttaagggtggcagaggtggaagaaaatactggtgtaagtggatttgtgaagttcaaaccagtgttgttctggagtcaattgtagtggattttgccaaatgctttttgtttgtttgttttttgagacggagtttcgctcttgttgcccaggttagcgtgcaatggcatgatcttggctcactgcaacttctgcctcccaggttcaagcaattctcctgcctcagcctcctgagtagctgggatttcaggtgcccagcaccacgcctaacttatttttgtatttttagtagagatggggtttcaccatgttggccaggctggtctctaattcctgacctcttgtgatccacccgccttggcctcccaaaatgcgagattacaggcgtgagcaaccatgcctggctgccagatgctttttctatgtgtgttgagatgatcatgtaattttgttttctattctattgatatgatgcattgaattaattgatttttggatcttaaaccaaccttgcattcctgagacaaactccacttggttatgttatatataatttttaaatgttgctggatttgttttgctagtattttgttgaggatttttgcatcattctcatatgagtatcagtctgtagttttattttcttgtgactttgtctgattttagagtatcatagtaatactggcctcataacatgaattgggagatgtcttccctcttctaatttttagaagagtttgtggagaattggtattaatttttttaaaagaagcagcaattgcttatttttctaatcaggtgtctatgctgctgaatcttaaggcctcaacaaatgttgcaccttattatttcattgaacaataagaccttctattctgattattcccggtaaataggaataatcactggtttctccagtggtttccacttgccaaaaactcatgacagatgacttaacaaggtggcacctgctttcaggggattgtatcagatgcatactcatttccagtgcagcagctgttggcaatctaggacttctctatcatggttggccaagtagtcctgctttggctgccagagcttcattctgctgaatattacattcctgaagtctcatggatattctttttgtcatttaaaaatatttccataaagtgttctgaacaggctggtctcttcaggttttacatctgttgtgcagtcttaacacagtccaaaaagcagatttctgcaagtttattgtcagtcccaagaaattccttcaactgtttaatctgatcagattctggtatttgtgcacccatattcttttggtacatttattagtcatcttctctgatgcatgagtttcctttctgttcttgtaaagtagtgttccaacctttgtttgaatgtcttcagtgagacgtgatttcttacctaagcacaggctctcacatctgacgtcagtacaaggctggaggcctacactgccagtcgagtctgaggatggaggatcaggatcagggcaagcattgcagccgctttatctaattcttctttaaacgttcattagaattcaatagtgaagccattcagggctaggcttttctttgtgggtagtttcttgattactaatttaatctcttgttatataggtctgttcaagttacctattttttcttgaaatttttttagtcatttgtgcctttctaagtatttgtccatttcatctaataaataatctaatttgtttaatggctattctttctgacattaatatagccactttgtctttcttgtgggtgttgtttgcatcacgtatcttttttttttttcccagacagggtcttgctttgttgcccaggctggagtgcactggcaagcagaggttgccactcactggaacctctgattcccaggtttaagtgatcctcccacctcagtctcctgagtagctgggattacaggtgcataccatcatgcttggctaatttttaaattttttgcagagacgaggtctcactgtattgtccaggctggtcttgaactcctggctcaaagtgaaacccctgccttggcatctcaaagtgctgggtttacagatgtgagccaccacatccagcctgcatgatatatttttccacccgtactttcaatctgttagtaactttctatctacagtgtgtctcctgttgacccacataactgtcttttatgtatagttattagaactattgataagaaaatgtgaaagtatagtcccattatcttatttgagtggaatcagtagactatttcataaaatgtattctagtttatagtttagaatagtttgtttttcatggcttttgagaaaaacatttgaatgagcttacattttgttgcatttaaaatttctgggtttttgttgttgttgttgttgttgttttgagatgcagtctctctctgttgcccaggctgaagtgcagtggtgtgatcttggctcactgcaacctctacctcccaggttcaaatgattcttgtgcctcagccccctgagtaactgggactgcaggtacatgccacgacctggctaattttgtatttttagtagagatggggtttcgccctgttgggcaagctggtctcaaactcctgacctcaggtgatctacctgactcagcctcccaaagtgctggaagtacaagtatgagccactgcgcctggccaaaatttctgttttttaatgaatccaaagttcatgtttttttttcttcccaatgccatggtacatatcatcaccaaaaaaagtagtgattttgcttcagtgaacactgaattttaatattattgatagaatggctatatcgatcagggttttacacttatagtacagtatacttgcaatgtaggtaggcctcatcctttgtaattaattaattagcttgtaattatgtaagctaatctaaattttcatattttcagttttaacatttgggcttttgagttacatttcttatattttgatttttttctataaattttaaaaccagaaagacaacactagaatcaattaaatgcaagattgaaagggtttcataatgtaaaagagcaatcttgtttttgaaatgttcagtttacagtaaggatcgagtagctctgcagctaccgatttgggaaatacctgaggttttttttccccttgcacttacaggctgttttagccctgaaggtggctagtaaggacacagactttagagtgccacgacagttccataacaggaatgaattgaagaagagaagcagtggagtcaggagcctcacaaattaaagacaactggtgaagagaaaaaccatttattttcgatacttaagatggctgagcctgtaattccagcagtgctttgggaggctgaggcaggtggatcacgaggtcaggagattgagaccatcctggctaacacggtgaaaccctgtctctactaaaaatacaaaaaattagccgggcatggtgggcacctgtagtcccagctactcaggaggctgaggcaggagaatggtgtgaacccgggaggtggagcttgcaatgagcagagatcgcaccactgcactccagcctgggcgacagagcgacactctgtctcaaaaaaaaaaaaaaaaaaaaaaaaaaaaaaaaaaaagatggccgaataggaagagctccagtctgcagctcccagcaagaccaacacagaaggtgggtgatttctgcatttccaactaaggtacccagttcatctcattgggactaattaggcagtggttgcagcccacagagggtgagcagaagcagggtggggtatcacctcacctgggaggtgcaaggagctgggggacctccttcccccagccaagggaagccatgagggactgtgctatctggcccagataccatgattttcctatggtttttgcaatccgcagatcaggagattccgtcgtgtgcctacaccaccagggccttgggtttcaaacacaaaactgggcggctgtttaggcagacacttagctagttgcaggagttttttttcgtaccccagtggcacccggaaccccagcgagacagaactgttaactcccctggaaagggggctgaagccagggagccacgtggtcttgcttagagggtcccactcccacggagcccagtaagctaagaaccactggcttaacattctcactgccagcacaacagtctgaaattgaccttggaccattgggcttggtagggggaggggcatctgcaattactgaggcttgagtaggtggtttttccctgacagtactaaggtggcggggaggtttgaaccaggtggaattcaccacagtgcagcaaagcagctgtggccagactccctgtctagattcctcctcactggacagggtatttgtgaaagaaaggtagcagacctagtcaggggcttatggataaaactcccatctccctgggacagagcacctgagggaaggggcggctgtgggcgcagcttcagaggacataaactttcctgcctggtggctctgaagagaacagctgatactgacaaggaggattctcccagaacagtgcttgagctctgcttagggacagactgcctcctcaagtgagttgaggagactccgtgccttctcactgggagagaactgccaacaggggccaacagacacctcaaacaggagagctctggctggcatcaggctggtgcccctctgggacgaagcttctagaggaaggaccaggcaacaatctttgctgttctgcagcctccattggtgatactcaggcaaacagggtctggagtggacttaaagcaaactgcagcagacctgcagaagaggtgcctgactgttaggagaaaaactagcaaacagaaagcaacaaactcaacatcaacaaaaaggacccccacacaaaaaccccatccaaaggtcatcagcctcaaagatcaaaggtagataaatccatgatgatgaggaaaaaccagcgcaaaaacggtgaaaattccaaaaaccagaatgcctctttgcctccaaataattgcagctcctctccagcaagggcacaaaactggacggagcaaccccaagacacctaatagtcagattctcctctgagctgaaggaccatgttctaacccagtgcaaggaagctaagaaccttgataaaaggttataggaactgctaactagaataaccagtttagagaggaacataaatgacctgatggggctgaaaaacacagcacgagcacttcatgaagcatacacaagtatcaatagccaaatcgatcaagcagaagaaaggctatcacagattgaatatcaacttattgaaataaagtgtgaagacaagattagagaaaaaaaaaataaaatggaatgaacaaaacctccaagacatatgagactatgtgaaaagaccaaacctatgattgattggtgtacctgaaagtgacagggagaatggaaccaagttggaaaacacacttcaggatattatccaggagaacttccccaacctagcaagacaggccaacactcaaatttgggaaatatggagaacactgcaaagatactccttgagaagagcaaccccaagacacctaatcatcagattctccaaggttgaaatgaaggaaaaaatgttaagggcagccatagagaaaggtcaggttacctacaaaaggaagcccatcagaccaatagcagatctctctgcagaaaccctacaagccagaagagagtgggggccattattcaacattcttaaagaaaagaattttcaacccagaatttcatatccagccaaactaagcttcataagctaaggagaaataaaatccttttcagagaaggaaatgctgagggattttgtcaccaccaggcctgccttacaagagctcctgaaggaagcactaaatgtggaaaggaaaaagtggtactagccactgcacaaacacaccaaaatataaagaccaatgacactatgaagaaactgcttcaattagtgtgtaaaataacctgctaacatcatgatgacaggatcaaattcatgtataataatattaaccttagctgtacatggcctaaatgccccaattaaaagacacggactggcaaattggatgaagagtcaagatccatcggtgtgctgtattcaggagacccatctcacttgcaaagacacacataggctcaaaataaagggatggaggaatgtttaccaagcaaatggaaagcaaaaaaaaaagcaggggttgcacttctagtctctgataaaacaggctttaaactaacaaagatcaaaaaagacaaagaagggcattacataatggtaaagggatcaatgcaacaagaagagctatcgtaaatatatatgcacccactacaggagcacccagattcataaaacaagttctcagagacctacaaagatacttagacttccacacaataatagtgggagactttaacaccccactgtcaatatgagatcaatgagacagaaaattaacaaggttattcaggacttgaactaagctctggaccaagcggacctaatagacatggggttgctacagaactgtctaccccaaatcaacagaatatacattcttctcagcagcacatggcacttattctcaaatcaaccacataattcaaagtaaaacactcctcagcaaatgcaaaagaatggaaatcataacaaacagtctctcagaccacagtgcaatcaaattagaactgaggattaagaaactcactcaaaaccacccaactacatggaaattcaacaacctgctcctgaatgaatattgggtaaataatgaaattaaggcagaaataaagaagttatttgaaaccaatgagaacaaagagaaaacgtaccaaaatctaggacacaccaaaagcagtgttaagagggatatttatagcactaagtgcccacttcagacagctggaaagatctgaaatcaacaccccaacatcacaattaaaagaactagagaagcaacagcaaacaaattcaaaagctagcagaagacaagaaataactaagatcacagcagaactgaaggaggtacagacatgaaaaacccttgaaaaaaatcagtgaatccaggaggtggttttttgaaaagattaaccaaatagatagactactagctagactattaaagaagaaaagagagaagaatcaaatggacacaataaaaaattataaagtggatatcaccactattctcagagaaatacaaactaccaacagagaatactataaacacctctatgcaaataaaccagaaaatctagaagaaatggatacattcctggatacattcctggacacatacaccctcccaagactaatccagggagaagttgaatccctgaatagaccaataacaagttctgaaattgaggcagtaattaatagtctaccaaccaaaaaaagcccaggaccatacagattcacatccgaattctaccagaggttcaaagaggagctggtaccattccttctgaaactattccaaacaattgaaaaagagggagtcctccctaactcattttatgaagccagcatcatcctgattccaaaacttgacagagacacaacaaaaaaagaaaatttcaggccaatatccctgatgaacatccatgtgaaaatcctcaataaaatgctggcaaacgaatccagcgacatgtcaaaaagcttatccaccacaatcaagtcggcttgacatgtaaggctggttcaacatacgcaaatcaataaacgtaatctatcacataaacagaaccaatgacaaaaaccatatgattatctcaatagatgcagagaagtcctttgataaaattaaacatccttcatgctaaaaactctcaaaaaactaggtattgatggaacatatctcaaaatataagggctatttatgacaaatccatagccaatatcatactgaacaggcaaaagctggaagcattccctttgaaaaccagcacagacaaggatgccctctctcaccactcctattcaacatagttttggaagttctgactagagcaatctggcaagagaaagaaataaagcgtatttaaataggaatagaggaagtcagattgtctctgtttgcagatgacatgattgtatatttagaaaaccccatcgtctcagcccaaaacctccttaagctgataagcagcttcagcagtctcaggatacaaaatcaatatgcagaaatcacaagcatttctatacatcaataatagacaagcagagagccaaatcatgagtgaactcccattcacaattgctacaagagaataaaatacctaggaatacaacttataagggatgtgaaggacctcttcaaggagaaccagaaaccactgcccaagaaaataagagaggatgcaaacaaatggaaaaaaaattcagtgttcatggataggaagaatcaatattgtgaaaatggccatattgcccaaaataatgtatagatccaatgctattcccatcaagcttccattgactttcttcgcagagttaaaaaaaaaaaagaaacaaaccttaaatttcatatggaaccaaaaaggagcctgtgtagctaagacaatcctaagcaaaaataacaaagctggaggcatcatgctacctgacttcaaactgtactacaaggcaacaataaccaaacagcatggtactggtaccaaaacagatatatagaccaatgaaacagaacagaggcctcagaaataataccacacatctacaaccatctgatctttgacaaatctgacaaaaacaagcaatggggaaaggattccctgtttaataaatggtgttgggaaaactggctagccatatgcagaaaattgaacctggatcactgccttacacattatacaaaaagtaaccaagatggattaaggacttaaatgtaaaaccgaaaaccataaaaaccctagaagaaaacctaggcaataccattcaggacataggcatgggcaaagacttcatgactaaaacacccaatgcaattgcagcaaaagccaaaattgacaaatgggatctaattaaactaaagagcttctacacagcgaaagaaactatcatcagagtgaacaggcagcatacagaatgggagaaaatttttgcaatctatccatctgacaaaggtctaatatccagaatctacaggaacttaaacaaatttgcaagaaaataacaaccctatcaaaaattgggcaaaggatatgaatggacacttctcaaaagaagacgtgcaaccaacaaacatgaaaaattgctcatcatcattggtcattagagaaatgcaaatcaaaaccacaatgagataccatctcatgccagttagaatggcgatcattaaaaagtcaggaaacaacagttgctgttgaggttgtggagcaataggaatgcttttacactgttggtgggagtgtaaattagttcaaccgctgtagaagacagtgtagcaattcctcaaggatctagaaccagacataccatttgaccgagcaatcccattactgggtatgtacccaagggattataaatcattctcctataaagacacatgcacacatgtgtttattgtagcgctatttacaatagcaaaggcttagaaccaacctgatgcccgtcaatgatagatagagaaaatgttgcacagagacaccatggaatactatgcagccataaaaaaggatgagttcatgtcctttgcagggacatgatgaagctggaaaccatcatttttagcaaagtaacacagaaacagaaaaccaaacaccacatgttctcattaataagtgggagttgaacaatgagaacacatggacacagggaatggagcataacatacctgggccagctggtgggtaggggtcaaggggagggagaggattaggacaaatacctattgcatgcagagcttaaaacttagatgatgggttgataggtgcaccaaaccaccatggcacatgtataccaacgtaacaaacctgcacgttctgcacatatatcccagaacttaaagttaaaaaaaaaaaaaaaaagccaggcgcagtggctcacgcctgtaatcccagcactttgggaggctgaggcaggtggatcacaaggtcaggagatcgagaccatcctggctaaaatggtgaaaccctgtttctactaaaaatacaaaaaattagccaggcgtggtggcgggcatctgtagtcccagctacttgggaggctgaggcaggagaatggcatgaacacaggaggtggagcttgcagtgagctgagattgcgccactgcactccagctctggcgacagagcgagactctgtttcaaagaaaaaaaaacttcagtttacttgattttgcttatagagttctttgagaatttaaatcatcctttctgaattacagaaagtcatagattagaagtgtagctttaaaatgctctagatcactctgaattaagaaaaagggtttcctttgtccagaataagcatcaatttaaaacagcatttaaaaacaagtattcaacaaattggtatacgaattataacacaagcaactaaatcactgactttgattagtctctctactgattactactgttgaacagaagttgtgtgtaagaataggagaaggtgaactcattgtcttgagcatgtggaattagttcttgtctgaggccagatagcaatttttatcttattttcagtatagcagatcctatgctgccctgataagaatcacctgcacagcctcattgactctcacggaagtattccagtaactctttgaattttttcctagaaaaattggcatctgttacccctacacaattccttcataaacagtagaaatttcccccatgaaacctttcctttaaccttaacattcttcgataattatttatgaagtccttaaataattattacaacaagtattggttttgaatacgtaccagctttggaatactgcttaaggaaaccatgataaactccaactcctttatgattatttagaggaatatatctatttgttatagtcttaaggaaaaccttgtcaacatattagatgatagaaacagtcataaccagcgaccaccaggtttggtgggaactcatgatgtgaagggtctactccatgttctgccaaccaagtaactaagtcattttgggcaaatgattcagctgacttgatctgttacatgattcctaaggtctgttatagctccaatatttcatggcatcactccactttaatgtattatctatcttaaaaaagttaaacagaaagatcaattagcacttatattaaatttgagttgctgaatattttattttttctcacttccactcactgcttccactatttgggtaatgattgttggagctgtatgcatttataatgcattaagtacagtgtggtatatcagtaaaacttcattacaaatattcattccatacatttgtctgtactggggtcagtttttttccccttcttcttctttttaaagacagggtcttgctctgtctcctcctgtcttggtctcccaatgtgctagaactacgggcatgagacactgcacctgctcttttctagttttatttgtctatctgaagagtttattatttggctaagctcacatggcaaggtaggtatcatgaagtgttaaaacccagcttttctgctaatgttcttgtgagataaaccaactattagtaaagatacttgcttcctaatcaagattacttggaattgttaagagagtatgtatgtatgtataagttaactttttaaaaacttctctgctgcctggaggaataatgaaatgacccaaagggatagaagcaaaatatttcagatagtacataacgtatatacttagccttgtgcaatcaagaattaatgatataatgtgtatggagtaatatttaactttatttcgttataagcccttttgggatagtggttgttccacataacttttatcttctttaatgcttagtatctgctagaaatgtagtctgtgggatcataagagttggggaagatttacagatagcattttcagagactgaacagaaaagcatattgtcatttggaaaaattttaaaagtgtctaacttttattcaggaccatttgcttttattttcctgttgttatttatttctattatcttgtttacagttgaaatttggacaattggtctgtatcttttctaattttcattatatataaagacttaggtttcctctttccttatgtgtttgttggtaaacattaggtgctatttttaagttttcaattctcaggcatagtgctacttatccatgttatttatataagcaaatgagcatatttgccaatcaatccacggtaagaaacacaatttaagttcctaccaaggatacctctgtgtgtgtgtatgtgtgtgtatgtatctgaaatatttcactaaataattcatttttttttttttttttttttttttttgagacggagtctcgctctgtcgcccaggccggactgcggactgcagtggcgcaatctcggctcactgcaagctccccttcccgggttcacgccattctcctgcctcagcctcccgagtagctgggactacaggcgcccgccaccgcgcccggctaattttttgtatttttagtagagacggggtttcaccttgttagccaggatggtctcgatctcctgacctcatgatccacccgcctcggcctcccaaagtgctgggattacaggcgtgagccaccgcgcccggccaataattcatattgttaatacctcaaccatatcttgatattctgttagctttttaaatgatggttgtgaccaactacagttcacatttttcactagtggatcacactctgcagcattaaaatcaccgtgaaatagattaattagaataaatgaagtgttcttttttcattctgtttgtacagtagatattattggattattttataaaatacccattttataaattggatggtatgttataaatggatagtaggatttttcctttcttcattttgtaccaagagaataaaaaacactcctgttcagtacatctctagcaagcctatttcaacatccaatgtctcaaataattaatttttctatactttagtcacccttacacctaaacgttacagtgcttcagtataacttctatgtaaacattattaatcccatttacagatgggaaccagagtgttgggagacaggtcatggatttctcatgttcctgcacagtctaagtgttctaaggagaggcatttacagtgccaattgtataaggagaaatttcaggacagtaaaactactgacatgtccctccctggagacgtccaaggataataaaaataaaagaccttctcttccccttcccagaggagatttgcttatatttgagtgtaatgagcaatctttctgggcagagcagggtggcaaaccaatagaagatcagagttccttcatttgggggttactctcctgtgatgctctctactgtatgcactagtaacatccatcccttactgcattgcctcatggagattggagctcagggaactggtctaaatatattgttctaggtgctgcttttgctacgagtaataaattgtctttgtttctgatccacagttcttgtgtccttatgtcattgtgtgtgtgtgcatatgtgtatgcaggagaacgaatgcggcagattgaagagcagttgaatatcagacctttgtagtgtggtggtggtgattatggtgttgagacagaattttgctgtgttacccagtctggtgtgcagtggcgcaaggctcatttcagccttcgaactttcaaactccatgggctcaggtgaccctcccagctggtactgaaggcacaccccaccatacccagtgattttttttttttttttttttttaagagacagggttttgtcatgttgccgaggctggtctcaaactcttgggctcaagcaatccacccacctcagcctcccaaagtgctggggttacgggcataagccaccatgcctagccctttgtgatttttttaacttaactctggctcacacaatttaactgtaggtctgtttgtaaacctgaagcgctttctatgctttcttccttacatagaccgataaaataagtagaaaatatggtgctaatgactagtatttggtataagtagataaatgttttgtatcacatttgcatgcttataatctgtgatcaatgagcagtctgaatatttttccctccatcctcataagttaaactaaaaaaaagttatagattgaggctgggatatctggtggcgaaattatatttatttgaacagagtttgtgtatatacatacatatttcagaatatattgaaaaataaaagtgtaatgaccttgataaaaatgaaatattcacttaaaaactccatttaataatgcccacaggaaagaaatgcttctagaattttttaactaatcatttttctcagtacttttgattgtcatgcaaactaaagaaatggacttaatgaacaatttagttacaataataaagtttcaaaaattctaaatttacctcataattgcaacagatgcaaaattatttcatatctttatactcgttatgaaattacctcatatccaaaaatatttatgtcaagtgacaggctttttgcagcatttttgatattattacccttgtaatatataattaactttgtaagttaaccttgtggaacttttaagggaaatgcattaacttagcattaatatagacttctaaaatttactgtgatgtagaacatttgatttaatgttgtctgtgtctaatacaaaataactgtggtccacttacttatttcaaattttattctcaaaggtacctactagattatgtgtgaagaagtttgtgaccaaagtaatataactgattctgttttgaaaatctagaataaagtttatgcaaaagcatatggattatttctttatgaatgcagttttatactaaaaactcctccatacccacgtaagtagatatattctcatagtgatgtagaaaactgacaaaacttttcatcctcagagctaggaattcttgtgtttggccacaagggaaagacaaaggtattagaattttaaataagctatcatcaacaaatactacatctctccagctccattcataaatatagcaacattttggaagtgcagatgaatcgaacatagttaagtgagaaaaatttttagtaacatacataatttgtaaatattgaatcgttttttaaatgatactctgagtcataattatttcaaattgtacataatgctagaagaaactaggataatagcagaataagttacagtgactaaaatcataggtttttttaagagattggggagtctctgtggtgcccagtctggagtgcattggtgcaatcatagctcactgtaaccttgactcctggcttcaagcaatcctcctgtctctgccttccttttgtagtttcaggtcttaacatttaagtctttcatccattttgagttgatttttatacatggtataagatgaggatctagtttgattcttctccatatggatatctttggtctatatatttatttatatgacagtaccatgctgttttggttactgtagcttggtaatataatttgaatttgtgtagtgtgatgccgcagctttctctttttgctcaggattattttagctatttggggtcttctgtggttccatatgaattttaggatttgttttttctatttctgtgaagaatgcctttggtattttcatagagattgcatttaatctgtagctcactttggttagtaaagatattttaacaaggccgagcatggtggctcatgcctgtaatctagctctttgggaggctgaagtgggaggattgcttgaggccagggattcaagaccagcctaggcaacatggcgtgaccgtccctacaaaaaaatatttttttaattagctaggcatggtagcatacacttgtagtcctgtctacttgggaggctgaagcaggaggatcctttgggcccaggtggtcaaggctgcagtgagctataatcatgccactgcactctagcctgagcaacagagagagatcttatctctgtgtaaaagaaaaagaagtgtaattaaaggaaaaaaacattttaacaacagtctttcaattccaaaacatgggatgtctttttttccttttctcttcagtttctttcatcagtgttttataattttccttgtatagatctttcatctgcttggttaaatttatttcctggttattttatttttttgtagctattgtaaatggtttgctttcttgatttctttttcaggttggttgctcttagtgtatagaaattctactgacttttgtatgtcgattttgtatctgacaacttaataaattcacttaccagttctaatataatatggtctaattaatatattagactagaagtataagatctctcctggagaatgttccatgtaccgatgagaagaatgtgtattctgtggcagttggatgaaatgttctgtaaaggtctgttaggtttatttggtctagagtatagtttagcttcactgtttgaagttaaacactgatgttcttacatttcttataagaacattttatgtttcttatgtataagaacactgatgtttttatatttctagtctaataatgtattattaaactaaaaatataagatttgtcctggagaatgttccatgtcctgatgaaaagaatgtgtattctgtagcagttggatgaaatgttctgtaaatgtcttaggtttatttggtctagagtatagttttttacttcagtgtttgttgattttctgttgggatgatctgtccattgccgaaagtaggaaattgaaatcccctactattattgtatttatctcttgctcttgctcttatgtattcacacttgctctctctcatgctctctctctctctctttccctttgtatctaataatatttgctttatatatttgggtacaccaatgttgggtgcatatatatttactattgttatatccttttgctgaattgacccctttatcattatattatgatctcctttgtccctttttacagtttttgacttaaagtctattttgcctaatgtaattataggtattcctgcccttttctggtttttatttgaatagaatatctttctgcatcccttcactttcagcatctatgtgtctttataggtgaaatgagtttcttgtaggcagcatgtatctgggtcttgtttttaaaatccattcacccaccctgtgtctttatttgggttttatttgagatggagcctcactctgtcccccatgctggagtgcagtggtgtgatctcggctcactgcaacctccaactccctggttcaagcgattcttctgcctcagcctcccaagtagctgggactacaggcgtgcaccaccatgcctggctaatttttgtatttttagtagagacggtttcactatgttggccaggctggtctcaaactccggacctcatgatccacccgcctcggcctcccaaagtgttgggattacaggcgtgagccactgcgcccggcctatcctgtgtcttaattggagcatttagttcatttatattcagtattattgatagataaggttttactactcttattttgttacttgttttctagttgtttttaacttttcttctgcttcttttcttactgtctttctttgtggttaggtgattttctcttaagagtacattttaatttattgctttttatccatttttgctctgtggttaccaagaggcttataaataaacatcctgtagttatagcaagtatttaaaactgataatcaacttaactttgattggaaaaaaaacacacaaaagtgaacattaacttccttctcccccttcattttgaatttctgatgtcacagttcacatttttatattgcctatcttgtaacaaattgttgtagttattatttttaatagttttgtcttttagtcgtcttactacagatattagtgttttaaacactgcaaatacaatattaatataacactcattttagtgtttcttccagtttgaagaagtttttaaagcatttcttattggacaagtctgattatggtaaattccctcagcttttgtttgtctaagaaagtctttatttctccttcagttttgaaggataattgtgctgagcacagtaatcttggttgacagtttcttctccaccagcattccaaatatattcttccacattttcctggcttataaggtttctgctgataagtctgctaccaggcatattggatcttccttgcatgttatttacttctttcctttcagtgatttcagaagtttttctttgtgcctttgacctttgtgagtttgattataatgtgtcctagagtagtcttctttgtgtttaatctaattagtgatctttgaccttagtctacctgaatatttatatcttttttcaggtatggaaagttttctgttatcatttccttgtataagttttctacccctttgtctttctcagtccttctttgacttcagtaacctgaatatttgcccttttgatgttgtcccatagattttgtaagcttgcttgcttccttttctttttttttctcttctcaccatatttttaatcatttttctttgaactcactgattcttttatttggttaattctgcttctgttgctctctattgagattttcgcttcattaattttttttttttagttgcaggatttctggttttttaaaaaagttatttgagtctcttatatttctttcataattttctgaattgattcttcatgttttctttaagttctttgagctgtcttcaaacaggtattttgaatttttggagagatcacatatctcggtcactttcaggttagtctgtggtaccttattttgttcttttggtgtgatgtatttccctaaatgttctcaatgctttagaagtgtgatgatgtctgagcattgagggatttgtaatttattttagtcttcccagcctggctttgtttgtgcctgtccttcttcaagaggccttccagggattctaaagctgacttactattgcattctctgagcctctgaccaattacagccatctcagcactagagtatgctttaagcccaggttttctgagtcctgcaagggcaccaaggttgacacagctttctggcccagatggacctcgggaagacccaagggaggtagttgggctgcctgggaatgctgtccagacacctgaagccagaagactctcctagtggtcctgataggtatgcctcccaacaaatctctgcacagatgggataggtccctgactacaaagagagtggctggagttgagactgtgcgtctttggaatctactgtggaaaggaggctgattggctcacctcattggctcagattagcatgcatcacccaacaggtcccagtatctgggcagtttcttgactgcagcaagagggcttggagccaagactgggccccttcagtatctactatggatatgcctgtcacatggatccagttgggcgtgtgtctcccagcaagtccctccatagatggaatgattccctgactacagcaggagaggctggaggtgtgactgtgcccccttgggatttgctgtgggacagaggattgagagcctggtcttggctcagaggggtgtgcatcgccctgaatgttcctgcacatacaggatatttccccaactgcagtgagacgagccaaagctgaaactgcaccaccctgggatctgctgttggatggaggttgatgtgcttgtcatgttggctcagatgggcgtatgtctcccagcaggtctctgcatagacaggagggttccctaacagcaggaggagggtctggatctgagactggaccctctcaggatctgctgtgggatggtggctggagaacctggtctgagcatgcatctcaccagtagaccctgtagacaagatagtttcctggttgcagcaggaaaggctggagctgagactgggctccctcaggatctcctgtgttgcagaatctggagagcctgtcttgtttgcccggacagatacccctcttccagcagatctctgcacagaattattttcagaccacagcaagaagggtcagagctgagaatggaccacctgaggatctgctgtgggatggaggttggcgtgcctgtctcattagctcaaatgggcacccatctcccagcaggttcctgtttctgcacagataggatgcatcccctactgcagcaggaggagctgaggctgagtctggggcctcccttgggatctgtggcatggagtctggagccccttgtctcattgactcagagacacacccacaggagataacttttcaacttctagtaagcaatcatttgaatcattaagtatttttggtgtattatacataaccacacttaattacaattcatacctgtaccttcttattgctacccatatttgaggaataggtctttcccttctttccttctatatttaaaaccttttatctatattttcttctcatgccttgagtctaatctcaaaccttgttctcttcttgatctttgctaactttgttgtaaatgtgctcctatcccactattgaaacaaacaggcaaactctccaacattcgccttatctatcctcatttcagctgaatttcttgacagtgtagttcacacttctttatctctgatgcattcagctgctctcaccacgtttttaaaatccagtgggcacgagtcacccatgaccttttagttgccaaatccagtgaacacttttcagttcttgtctgacttatctctggcatttatcagtgttgaccttaccataactctgaaacttttcctgtcttgcttagcttatgtgataccttttccctcaggtttttcttcttttctggctcctcttcttccttttccacagctggcaattcctactcttacagctcttctaatgttttcctttcctttcctttatctttaggcaaaggctatggtgtgtgtgtgtgtgtgtgtgtgtgtgtgtgtgtgtgtgtgtgtgtgtgtgtgttctagcaacctctttcaaatgaattccaatggattctaacactaagctggagtgtcaggtactacttgtgatttcttctcttttatcttcctgggagttttacagaatctacagtagtgatcactacttcccacagtcttttcctgacactttctttctccctttctccagtttattcacttctcttttagattacaggacaattttcctctgttctccgtacatccagcctggctgtcctccagtctgtgttccatagagctactgaaaaccctactaagaaacaaattttgtaataccatttccttacaatgcttcagtaattaatgttaacatttaggttaaaaacagccttatcattaagaaaacttttaaactgatttaaaatttatataatgtgaaatcattttaaagtatacaattcagtggcatttactgcattcacaatgctgcacaaccacaaccataatttctaaataattctaagttttcatcaccccaaagggaaactccatacccatcaagcagtcatttgtcattctcccctccagctagccccgttcatccattaatcagctttctgtgtccgtgggtttacctattctggaggtttcatatacatgaaatcatcactatatgtgaccttttctgtctggtcttttacttagaataatgtcgtggaggtgcatcccattttgttgcatatattagcacttcatttttttgattgaataatgttccattgtatagctataccacatttgttattcattcatcaattgatggacattcgagttgtttctgccttttgaatgcctgattttgattcatttttgtagagtccttaggttttcctaagtataagatcatttcgtctgggaacaaggctaatttaatttcctctttttcaatttggatgccctttatttctttgtcttacctaaatgctttggctgattcattttgggcaaatacctgggaagagtgtttaattgctgggtcatatggtaattctatatttaactttttaaggaaatgccaaactgtctactacaacatctacaataagataaattttcaccagcaacttatgagggttccagtttgtgtacatcctcactaactcttgttattttattttccagttttaaatactattaatatctaactcagtgggtataaagttatatctcattgtatttatgatttgccttttcctaatgactaatgatattgtaaatgttttcatgtgcctgttgcccatgcatacatctttttgggagaaatgtatattcaacttactttcccgttttttatttgagttttatttttaaccaagaaataccttttaagtgatcagacctggaaccttgccaggtttaatgattatcaaagcagagccatattttgacttttgatgttatctattattatagtcttgttattcataattacttgaatattatcagcatctctagatcctttgtagttaaaacatagtaaagtattttaagtctttatactaaaatagtacgtcttgaaagttttaatatagaacactctgcttagcatttctttataacctaaaatgcaattaataaaagggtgtcatttcctctgccaattaagtagccttcattggttgatattgaacaaattgctgatacttatttctgtgatgtttactttttaaaaaaaatattttttgctttctttttaacacttccaaacaattgctaggttaatttgtcagttgcaaatctgaaataaaattgtttttagcagtctttcaaataaaattttcgttgagactaaagagatcctggattacaatcaacatttgtagatatgtcatacatagagaaccaaaaaaaaattataaatctgatataaatatcagtgtgccatacaggcatggtggctcatgcctgtaatctcagcattttgggaggctgaggcaggtggatcacttgagtctaggagttcgagattagcctgggcaacatggtgaaaccccatctctataaaaaatacaaaaattagccaagcatggtggtacacacctgtagtcccagctgtttgggaggctgaggtgggcggattgtttgagcttggtaggcagaggttacagtgagccaagattgtgcctctgcactccagcctaggtaacagagcgagaccctgtctcagaaagcaaaacaaaaacgcccaaatatcaatgtgctatgaaaccacacattgtatgtgttcattcccacaaattggagcattttaagaagcgctctaaattagtttatgtcttgcttttcttcttatgttctgtagattctttagtactccataagaaaaatttgctatagaaagcataaaaactgcaaatgcattatatcctccatgaaaccagctttaatttagttgctaaaccctgatcattgttgcactatacactcagaaaatgtatagcagtgactattttgtaaatatgaagagttcatattcagcacattcagcaatggtttatatctaaaatgatttttgaagaatgctttaaaaaacttctttgcctagagtctttaaagctggcactttaaaactatgtttcatggattgtcagttggaatggacttcaggaggtccataagtccatgaaattacagttttttaacatgaatttttctgaggatacatgatttttatcatactctcaaaagaatctaaaactcaaaaatggttaagagacacttaaataaaatgttgataaaggccatggtcattgattctcattcttcagaagctttgcatgtgtgagtttacctactcactaaaatgtacttgtaaatccaaaaccagtactcggtgcttttgcagtcatttgtaaacatatttggagaagcaaaaattttgagttaccttatgtgttcattcctctctgaggtcaaagaaggtgatggtttgccttgtttcagctgtcatactgtaaacaagtgtccttttcaatgcgtatttagtgccatattaatcacattttttgttgttgatttttctgtttaaaatggttcccaagcatagtgcagatatgctgtctagtgtttctaagcataagaaggctgtgatacacctgagagaataaaaatctgtaatagacaaacttggttcaggcatgagttacactgctgttgactgtgagtttattgttaataaatcaaatatgaagtatcaatatctgtataaatagttaaatataattatatatagatgtaaatataaattgttaaaatacggaatctttaaacagaaacatacattttagaaattatgtattggcattggttgaccaagatgatgtttggagaggttttcaggaaactaaccctgtctttttcccaggaacaataattctgcaggaggcagaacctgttgtctaggttggagtacagtggcatgaacatggctcactgcagttttgacctcctgtgcttcttctgccccagcttcccaagtagttcaggctacaggcacatgtcaccatgcctggtaatttttgtattttttgtagagacagggtttttcttgcccagactggtcttgaatttctgggctcaaacaatcctcccatcttggccccacaaagtactgagattagagatgtgagcctccatgcccagctatagttaaccttttgcagtgtttttttttttaacttaatgtttctaaatttcttctagggtaaacatttactacgtagaggctgtgtgtcatttacctcttcatggtatcacacatcagatacttctaacataatcatgataaatgttagtggtttcatggtcttatttacactccagctctaccagaattcactaatctacttcaagtttctgtctgaaatattctttttttttttttgatacagagtctcactttgttgcccaggctggagtgccgtggccccatttcagatcactgcaaactctgcctcctgtgttcaagtgattctcctgcctcagcttcccaagtagctgggacttacaggcacacgccaccacacccaactaattatatttttagtaaacatggagtttcaccatgttggccaggctggtctcaaactcctgacctcaagtgatctgcctgccttagcctcccaaagtgctaggattaacagacacgagccaccgcatcctgcctctgtctgaaatattcttattgttcatcatacagtatattgggctacagtactgtatttttctccagggtgttggtaaccatttatgctgagtttagccattttacttaagagtctactaattcactgtagataaagagttactactttggcatggtggagcatgcctgtaatcccagctctttgtgggaggccaaggcaggtggatcgctcgagtctaggagctcaagaccagccaagacaacatggcaaattttatttctacaaaaattacaaatattagccaggtgtggtggtgcatgcctgtagtcccagctactgaggaagctgaggtgggaggattatttgagaccgggaggtagaggctgcaatgagccatgattgtgccgctgtgctccagcctcagagacagagcagtaccacaaaaagagttagaagagttctttatctaacaaatatgagttgtatatttgcatagttgattgcattcatgaagtctaagtatttttttattcattaaatctaaaggaagttggggctctctgctttcgataagatgaagtaacaagtactgtacttatccttcacctaaaataatgattaaagaaaatttgtgtgtttatttcttaagacacagaacaagcatttgataaaatccaacatccattcctcataaaatcactcctgaaactggtgatagagaggaacttcctcaacctgataattagcatctataaggaaccaatggtaatattatatttactggtgaatgtctgaatgctttctcactaagatcaggaataagacaaggatgtctactttcactacttctgttcgatactgtactgcaggttctagccagtgcaattagttaagaaaaagaagtgcttctagattaaaaaacagaagtaaatcaatcattatacttcagtgatatgatcatctatgtatattattctatagaatctacaaaaaggtactagaatgaataattgagtttagcatgcttgcagaatataagatcagtatttaaaactcatgtagttttctgtactaggaacaaaaatttgaaattaaaatttaatagaagaaatattttctatcacataaataataggctatacttggggacaaatctgacaaaagatctggaagacctttactctgaaaactgtaaaaacattactgaatgaaaataagtgtgcagattctttacatatgatactaatagaatgatctgtttaaaattgattaattgtgcatcagctatatacataagccaaaacttaaacaattgtacaccttaaatatgtacagttaattttgttaattcaaatccctatactactgttaaaacaaattagaaaaacaaactaaaggaatttatgttcatatgacagtgaatgagttgtctgaactcacctcaatttttaatcctaagatgaatccatctctaaaaagtactgaacatctctgaaaagttatgaatatggtgtatgttttctcccataacctcatatatagcaattattgttattaggaaatcagaactagcttaaataatcataacattgaccatctgctttccttgttaaatacatttgactactaacttaatgttttcagttagccctctaaaatttgagaaagcaacatcttttttacctttttgccagatttctacaggctttctgatatatagttggccctctagatcattgctggcagtttgaaatatgtgtgattatgatagagtatttaaaatattttattataaatatttgatcaattttttattatataaattttcttcttttaaaaaaatacaatttagagatggggatcatactatgttgcccaggtcttgaactcctgggctcaagtgatccttctgccttggcctccaaaagtgctgggattatagatgtgagccactgcacccaggctagggtaaacttttgataaatatttttgattatgtagaataattttatggtgagttcaaagtagggttttgcaatttttattgtggagatgtatttatactgttagtttcaggatatctgtactgatcatctcctgtgtttttaatcatgatgtttccttttcaaacaacacattatgatgaaagatcaattttcaatgaaatcatttataagtatatactagctattgcaactttggggtttggaaaggaaaaattaaagtgtgttatgtttacatgttggaaacatgttagaaaaatcagtctaggattggaaggagatgggaagatttaggagtaactgctaatgggtacaaggtttcttcttagggtgagaaaatgttctacaatgatttgtggtaatggttacagaagtatgattatacctaaaatcattgaatcatatgctttaactggataaataaaaggcatttatattggaaaggaaatagtaaaactgtatctgtttgtagataacatgatcttatataccaaacaaaaatcttaagcagtcccctacagatctattagaagtaataaatggcttttcacactacccacatagacgtccatacggcgttctttctggattcccatcgtagcttaaagcgaaacttttcaccatgtctggagcccttgatgtcctgcaaatgaaggaggaggatgtccttaagttccttgcagcaggaacctgcttaggtggtaccaatcttgacttccagatggaacagtacatctctataaggaaaagtgatggcatccacatcgtaaatctgaagaggacctgggagaagcttctgctggcagcttgtgccattgttgccattgaaaaccctgctgatgtcagtgttatatcctccaggaatattggccaaagggctgtgctgaagtttgctgctgccactggagccactccaattgttggccacttcactcctggaaccttcactaaccacatccaggcagccttccaagagccacggcttcttgtggttactgaccccagggctgaccaccagcctctcacagaggcatcttacgttaacctatctaccgttgctttgtgtaacacagattctcctctgcactttgtggacattgccattctatgcaacaataagggagctcactcaatgggtttgatgtggtggatgccagcccgggaaggtttgcgcgcgtgtggcaccatttcccatgaacacccatgggaattcatgcctgatctctacagagatcctaaagagactgaaaaagcagagcagcctgctgctgaaaaggctgtgaccaaggaggaatttcagggtgaatggactgctccagctcctgagttaactgctactcagcctgaggttgcagactggtctgaaggtgtgcaggtgccctctgcgcctattcatcagttccctactgaagactggagtgctgagcctgccacggaaggctggtccacagctcccaatgctcaggccattgaatgggtaggagcaaacactgaaaggtcttaagctgttattgcacacgctcttaagcaacatggaaataaggttgacggaaaataaatgtcagtttaaaaaaaaaaaagtaatgcattcagcaaggttgacagataaaatatcaagatagaaaaatatattggatttttgagcaatattaatgggcaaattgaaaatgaagttatgaaacaatttcatttaaatatcttaaaaagaaataatgtacttaagtataaatataacaacagaagtgtggaacttatactctaaaaactacataacattgaaagacattaaaggaaactaaatggaaagacattaaatgttgatattttgaaaagatttaatatttttaggatggcagttctcccccaaattgatctaaaataaatttcctactaaaatcacagctaaattctttgcacaatttgacaagctgctcttaaaattaatatggaaattcaagggacccagtatagccaaaacaatcttgaaaaagaccaaaattgtgtttctcacttcccaattaaaaaacgtatgatgaagccataccaatatgtagttctggcataatgatagacatatctattaatggtatagaattgagaacagaaataagtcttcacatttatggtaacctgtctttctataagtgtgccatggcataaagaatagtcttttcaatgaagggtactagaacacctgcccatccatatgggaaaaaaaaaaagctggacccctatctcatatgcaaaaattaactcaaaatgaattaaagacttaaatgtaagaactaaaactgcaaccgttagaagacatagggatacatgtttatgactgggcatgggatatgagctggcaaatgattcttagataggtcaccaaaagcatgagcaataagagaaaagaataaataaattagatttcatcaagttttgaaagttttgtgctttaaaggacaccatcaagaaagtgaaaagacaacccacagaatgggagaaaattgcactcacatatctattttatcttgaatatataaagaattatttagactcaataatgatgaaaagacaaataactcactttaaaaaatgggcagaatatctgagtaggcagtttcccaaaagaagatatacaaatgactaaggagcacataaaaagatgctcaacataattagctatcaggtatattaaagtcaaaactacaatgagataccatttcactcctgctaggatgatgggtataatcagaaggacagagttttggcaaggatttggagaaccctaaggcattgctggtgggaatgttaaatagtgcagcctttttggaaaagagtcttgcaattccttaaatattttaacatagagttaccatatccagcaattctgctcctaggtatatacacaagacaaatgaaaatgtttgcacaaatgtttatagcagcattatgtataatagcctaaacatggaaacaacccaagtgtgttactgataaatgaataaacaaaatttggaatatccatgcaatagaatattatttgacaaaaaagaaatgaagtactgatacatgctacaacatgggcaaattttgaaaatatcgtgctaaatgaaggaagccagtcataaaagtacacatgttttatgattccatgtctgagaagtggcctgaacatgcatatttttagagacagaaaataaattagtgtttgcctgggacttgtgaagatgaggttttcggaagtgatgactcaagagtgaactggtttttttggggggtgttgaaaaatgttctaaaattgatgtggtgatgcctatacaactccaaatatactaaacaccattgaactgtacacttcaaagggatgaattgcatagtatgtgaattatatcttaaggagctgataaagaatatatatttattggtctgttttaccctttgaatggattttacccatatgtgatgtttttaccatgatacattaatcatttgccagagtttttgttccttaaattatgcatatcttacaaatgtaaaatgtcttatttgtcaatatcactactaaacaagaaaatagtctttaagcattgggaacctcactggtggatatgagttttacacgatcataattttcagagacccagggagaattatctcccattttttgattagttttctgtacactgttgcctaattatctttctgaaatacagattgatcaggtaactctctgatcccagcctgcttgtcattgtcatgcatggttagtccttcataaaatatgctattatggaccccatcttttactaaattcagagaaagcatgcccatgtctctctgtgttttttgtgtgtatgagtttctctatgtataattcactttagtttatttttcttcttttcgcctggtaaaatcttcaaacttcaagaaacagcatatctgttatttactctttgaccttttcattataccccatattccttggtgctttccaagttttttgttcgtacctttattataacactcctcgtatgttgttttcatgcttactcctccagtagagctatgaacttctcatgactttatttgtgcttctattccctcacagagtactttagatataataagagtctcttggattaatgagttcctaattttattgtgggtgctcagtaacatttttattttgatgatgttataattgaggtatgaatcagactccccttacactttctgcatataaatcttttttgtaaaagaattctatacattttaattatcctataaaaacttaattaccaatattgtttgtagatgtctgttgccagatttttaaaaaatgatgcattaccatccccataaatgataattgccttttgctttttttaatataaaaatgacaactttgcctgtcaaattataaaaaatgttttctcattattttcatttgccattctttggttactgtgctagagaatatatatgtctattgtttgttagtgtttatatcattgccctttaaaaaaattgtagttgtgcaagaatggatgtaggcaggctaaaatatggactctccagagatgtggatatgcctgggaaattgtcatttgatttacctgtcttcacaatcagcattttggaccgtgatacagttgttactacctatttacacttggctgataggcaggctcaaagctgtagcctcttattagagtcagtcaaggggggccagaatggcaagagccatttttttttttaaactgctggtcctacctcagcagcaccaggagagtggcaaagggggcttcttcaaagattttatggtatcttcactttatgtcaaagtctaagctatcagtatttttctttgtagtagttggtgtatgtgccaaagttagaaaatctttctctgtcttggttattaaaataagtggctgaattttctaatacctttatgggttctgttttgttttggtttgttttttcatttgtgtggggtttttgttgttgctgctgttgttgtttttacacttttggttaaagtgtgacaggaaaaacttttctttttttccctgaaaatggttctgtttttatgccagcttaatgtactaattccctcatttccgtctaaaaaaaaaatcacctttattttaatactatattgccataggtacttggatccgtgtttgaactctgtatttttctgttgatctgtatattagtaccaaattgtttctaaagcaattaacaaataatacattttaatacctggtagtaaactgctcccttaatcccatcattattactcatctatttcagaaggtactttcttattattcttccacatgaatttaaaaatcatattgatattttcaaaatatcacattggaatttgtaggttctttaggaagaaataacattttagggtacatttttgttttcttatcatatatcaagtttttcattttaattatttatttcatagctttttattatcgaaagtttcaaacatacacagagaaagaatagtaggtataatgagctccacgtttctattctctatctagcttcagtaattatttacatttgccaaacctgatttaagtacctctcctatgaagcaagtcccagatgtcttatcatttcatcctcaaatgctctagattgcctgagaatggtctcaaaaaacccaccatcatattattcacaatggtaatttcttactgctatttaatatccaatttagatttgcatttcataattgtttcaaaaatagccttttacagtaagtttatttgaatcagcatctaaagaattcaaacactatatttgtaccttgtgtcttttattattactgcttttctctctctcgtcttttttttttttttttaatactgtcattgacctttttttaaaagagaaactgtgttatttttccaggagaatatctcactttctgaatttggttagttgcttcatatttagtatttgctgagaatttgagctagagatttggttaaactcaggttttatttctttaggcaagaatcttcttaaagtgatgctccatcatttccattttatctcatctgtgagccatcatatctggtggttccacttttaatgatgctgagattaatcaatatgttcaggtgtaggttttttgtttgtctggttttctttctgctattgtatatagaacattttccttactgtttttctagtaggttattattggtatctgagaagatttttaaagcatgtgttttagtaactggacatctgaccaaactctcattactgtgtcaacttaaaaatcatgagatctgtaaatctggaaaagagaactttatttctgagaagggttacaacctgtaggctgggaagcacagcctctggattagatcaaaagtagccatttcaaagacgatgggtgagagaggagttttacactaaatgggttagctgaacatacatatttaacaggttataggaggagctatgagtattcatgaaaggggttacatgtatgtatgataagcaaacataacatgttacatatgtcccatgttcgctttggaatggagacttaacattaaaaatgtggtaaaatcagactctatacatcaaaggtgaaacttaggactcaaaggtgctttgtgcacattctctgtaaactgaccagtccatggtcaattgtcgtttatcaggaaggattgctttgtaagttggtcagcagtcatgtcaaaaccatgaaaagggaggggaatctggccacaacatcaggcagttggtcagtggaagaattttccattctttcttttccagggctggtgtttgtttaactcttaggaaaaatagtctaatgacaggtagtgaggaagagtgtatactgagacgtgaccaacctcctatctcatcaaggccgggaaacttcgtttttaaagtttttctggggcctccttagcccacagacatctgttcagtaggttggggcacttaggattttactttatctcacaaatatctaataaaatttttgggtgatcctcttcagtgactagtatagaattgtcacacttgagctttggagatgaggtgtctcaaattaaaccctaggatggttatttagtctttctgtgcctcagttttttttttttttaatctatgaaatggagatcatgtgtctacctcataggtttataatgaagattgaatcacttcccataataatcagaaactacatatttgggctgggagcagaggctcacacctgtaatcccagccccttgagcccaggagtttgaggttatagtgagttatgagcatgccaaagcactcagagtgagattctgtttcaaaaaaagaaagcagatgtttgttttttaatttttccatatcttttgcagattgtgatattgtgctttccctttttttcatattttaggcctttaattttaggatgtaattatataggccataacagttaaaaaatagcagtgataacatgcatcctacaataacatgaatagctaatatttattttagtataattttcttcttgtataattatgttgttttagtagtatgttttgaatatcaccagaataaatttttggtatctattaaaataatactataatttctttacattgatcttttaagatacagtttatccaatacttatgatgccaggttccagaatgcattagaagagtgtttgtggcatagggaatgttggaacagaagcaacactttacaatgttaaatagttttattgagaaggtgagatttgggtaaagactttcaagatgagtgaggatccatatgggtttctgggggaaatccagttcagtggaggggttggcatttgctaaaggagggcatgtttggtgtgtttcaaaatccagtagggagccgggtgtggtggtgtgcttctggagtcctagctgctcaggaggctaaggtgggaggattgcttgagcccaggagttcagatctagcctggacaacatagcaagatcccatctctaaaataaaataaaaatttaaaaaattgtttaaaatcctgtagagagttcagagtggttggagcagagtaatggagaatagtagacaatggagttagagaggcaatgagaggtaaagggaagtggcttgaacctgtagggcctcatagactattgtaaagatttttgctttttagtgagtgttgttggaagcattacagggttttgaacaaaggaatgacatactttggcttgcatttaaaaaggacagctctatgtgcgtggagtcaaggatggaagcagagaggttaggaaatcatcgcaacagtctaggcaagcagttatggtaacttggatgggtggtagcgtggagttaatgaaaagtggttgaaatctggaaatagtttgagaacaggcttttcaaatggactggatgtggtgtgtgaataacactcttctcactggtcttgttgcctctccaatccagttatacacagtagcaaaaatgatcttactttacatttgataatttcaccttcttgattaaaatccttcagtgacatactattacactgaataaaatttatccttcttaatataaccaacaaggcccacataatctagaactgcatatttttctaaccgttttcatctccctgagctccagccatacaggtgttaaattgttttaatatgccaaagtttttcctgcctcagatgctttgcattgctcctccctctggaaacttcccctaaccgtaaggtcactctttacccaatcagctcatttgcatgtttcacgtctcagtttaaatgtccttttgtctatttaaaatatattttagctgagtgcctttaatcccagctacttgggaggctgaggcaggaggataacttgaggccaggagatagagaccagcctgggcaacatagagagacctggtctctgaaaaattgaagaattagctgggtttgatggcttgcacatgtagttctagctacacaggaggctgaggcagggaggatcacttgagcccaagagttcaaggttacagtgagctatgattgtaccactgcactccagtctgagtgacagagtgagactccatctctaaaaaaataaataattggttccttctttgcctgcctcccactctttgtctttctcaaacatttttttcttcatagcatttcttacaattatgcattttatttctgtgtaatgtttttgtttgctatgctttgcattttatattgtgtggaatctccatgaaaataaggaccagcctgacttgttcaagtttgtggtcaagtaacaggatggtacctggcccttagaactatctttataaatatcattagattggattgactgactcaattaatgaacaaatgaacaaacaaaataaatcattatatgctgaagtagcagtcctggacattgtatctaatttagattttaatttaaccttgttattttgatactcgcttcccttaatcagtcattgcatgttccttattgtaaggtggttgtttttctttatcatgagaagaatagttcttctccgggcgcagtggctcacatctgtaatcccagcactttggggaggctgagacgggcggatcacaaggtcaggagattgagaccatcctggttaacatggtaaaaccccatctctactaaaaatgcaaaaaattagctgggtgtggtggcatgcacctgtagtcccagctacttgggaggctgaggcaggacaatcgcttgaacctgggaggcagaggttgcagtgaatcgagatcgtgccactgcactccagcctgggcgacagagtgagaccctgtctcaaaaaaaaacacatttttttatttagctattagcttctaggcaaaatcttaaatttcagaaaataattatactcatatagtcatactacctgtcagggaaatgtgtcaaaggaaatatgaaacaatagctttaaagttgtcccgcaccctcaccctgtttttcttttgaaggtattatactaaaggaagaaagggaaaaagagaaatctatggtgtgagttcaagtttactactgtaagtgtttaagaaagggctctgttaccatgacaacaaatgcatgaatttcatgtggaaaattttcagtgtatgggactgataaaattgtaacattctgattttctctggtatagaattgttctttgtcaagttaaaaaaaatctgttaatatatgttaaaattaaatttttaaatgttttatgatattgttttctaattgtttattataacttaaaatcatagccaaaagagtgtactttcgtagatctgtcaagcagaaagttaagtatttgatttgacattaaaaattacttttctaatctgtattagatttttgctaaatggtaaataaaatggtaaatagtttcatgtattgggagttcttgacaatagaaaatgacctgccactttatagattcctttgccttaaatgcttactaactcaggtagaggaaagctgttaagctttaagtgctttgtcatatttgcaggcttttatagtggaagagaacagcagtcagcaatgatgatggaaaactgtggcaggtagacttaaaacaccataaagcacagacgattgtgtgtaatgccttgaattgaatcctttttgaatgaaatgatcagccatatgtgccacccttatggaccctgtaagaagagtagaagaaatgtgccctaatgctaactgtgcatgaaattgcagtgttaggagatattgaccagatgtttcaatctcagcaaatggcttgttatgtgactgagtgaaaatatctttgctgctttgatcacatacaccttgaaggaaggggtaatttaatagaggctgtcatagttcatcattgtcaataaactttgacttgacctttgccttacgtttttgatgttgctgctgttaagtgttgttgggcagatgtttactgccttgagggattttgctttttataaagtgtatactagaaaaagtaaaggagaaggattttctcaattcttttcttattctttggttattagttggcatgcttctctgtggattttgtagaatttctgggcagatgcatttgagtgacattcttatgtctaaagatcactgtggtgtttctctaaaggtttcttcctttcctcaccttcctttttcttttctcgagacatggtctcactctgtcactcaggctggagtgcaagtgatgtaatcttggctcactgcagcctctacctcccaggctcaggcgatcctctcacctcagcctcctgagtagctagaactacaggtgcacaccaccatgcctggctaatttttgtattttttctagagatggggttttaccacattgcctaggctggtctcgaacttctgagctcaagccatctgccggcctcagcctcccaaaatgctgggattgcaggtgtgagccaccgcacctggccctttctcaccgttttgtcctggttttaatttaccacaataaacttccttggtggtttttctttcttattttatatacagcctattcttttgttctgatgaaagtcacattgaattaaaacttgacacctattgtaacaccataccaggtgctgtgttatttttttatccctagttttggagacctttggagataaatccatgctattttgtaatccatttttgttaatcttaagaaattgagtgaaagtttcagtaacacaatttttttaaaattataagatacagtattttaaaattttggtaaatagctttggattaaatgagtttcttgtttaatttgatgaatttgactcagttctgtaacctttttgctctttttcttgaaaagaaaaaggcttcctcactggctatatctgggttctgcctacactcttccctcacttccccttggtgtaggtggcctagaccgtgttagtcacctaatgaaatctgtgaatcctctcttgaaaaacacagcaaagtttccttacaatttcaggatgtttattggattttccccccctcctctcacacataccctgcaatgataggggcccctggacttcaagcagactaacaaagcttagaaaataagattcatactccttcttagtattctagatatataacaatttgacttagaagtaacaataacaatagtattagtgatactgctacaataattacaacagtaataataataataataattaaaatttactttctgccaaccttatgccagattctatgctgaacctttaacctgtattactggttatattgttaatgatacctctagatagagtatatgcagcatacttttattctgtactttaggaaatactatatctttagaatacagatttgagtaagagattataagcattttgattctaagactttttggaatactgaacttttagttttctgattccagtagtcagtctgtctgtctctgtctctgtctctgtctctctctctctctctctttctcggcctctctgccattcatcttcttctgaaaattagctatcccacgtaagcctcatatatcccctaattcctatttgtagttgtgagggaggaaaaatattttccttctaagttctctgctgtaagattcttgtaacaaaagacagattaacaaaagttaagtacactaatttatattctaagttttatgtaacatagagggaaatgaagacttgaagaaacaattaaacctggtgtttttacattaggttttatgaagagtggaagggaaaggcaataggacaaaaaggggtatgaactaagagtagtaaactgaggggaccttagcaagacctgtttgtttagattcatctcatgtccttacatcttctgagataaggatgttctttttttctgcatatagtaaacatcctctcacatggatggtcttatgatttgcttcagaggaaatcagaaagtccttcctgcacctgctgttctcaaattccttcagcttaaaattttcagtatgtcaagtgccatattttgggggtagtgtgtcctgatctccatcatagttaagtgtcagcttggacacagtttctcatatttatcttaggaaatcttctttggccactctgcaaagactaaggtgctacttgcatgttctgcaacaactcctattatatatatatcatctcttaaaataaatagtaacatatcttgtatgtaagctttatgtacccttaaattgtaagttttaagaagatacaatcctggctttcctgttcacttatttgacaattatttaattgcatagaatgtagcaggcactcttctagatttggaaacacaccctacaactcttttaaaaaagccaagaaaacagtcttgaacagcaaattacaattaagtggaattaattctatgataggaatgatacagtttgttgcggcaacataaaatgcaggcatataggctgggcacggttgctcacacctgtaatcccagcactttgggaggccgaggtggatggatcacttgaggtcaggagttcaagaccagcctggccaacatggtggaaccccacctctattaaaaatgcaaatattagctgggcatggtggcgtgcacctgtaatcccagctactcaggaggctggggtaggagaattgctcgaacctggaaggcagaggtttgcggtgagtcaagatcgcaccactgctctccagcctgggtgacagagcaagactccgtctcaaaaaaataaaaaataaataacaatgggtatatagaacagaatttaggacaacattgtctcagtaagtgaaacctgaaacctaagtaggaagctagaaagaacaaacagaaacagaatgaagtattcagtgtactggaacattgcattcaagagtgttaatgcttaggattaacttggagaggaagttaatggttcaatcataaagttgtttatgttgaacttgcttaagatacttgggtaacgattgaaggacattttaggaagagcactcaaaatgcagtggattggagaaaaacagaactaaaggcagggagatgatctaagaagcttttgcaaatggttgcatggttgggaggatggagtgacagagagaatgggaaatgacatccaatgggtagaggtttctttttgagataatgaaaatgtgatggttgcacagctatgtgaataaacaggaaacaactgaattgtatattttaaagtggcaaattgtatggttatatgaatatatctcaataaatttttttaaaagagacttttatagtagtctaattgagagtagatggtggcctgtactaaagtggtgttaatagaggcaggagtaaaagtgtgtcaatttaataggcaaaatagggttgagtaggtatttggatattcagagcagtcatttgaaaacaagtataagctaaaaatgagggggtctcagcatatagatgataattgaaaccatgagagtagattagatcatatccagagaaagtatatacggtaagaattgtaggtaacctgggaatccaggcctgagaaatgctaaggaatggggagaaggaaagaagcctacaaaagagatagagaagacttctttatccattattaattacaataatgtccaacaaataataggtgatcaacaaatattggtggaatgaattgaatgaatatacactaaaaattctgcattttatcacagtctcagggcactgttgtcatcgtcagctgtactctgtaataggcactgccttgaacactttgcttacattatcctattcaatcatcacaataattccacaagaaacatagtctctgaaatagtagcttgtttaccatcacatggctggatgaacttatatatctgagtctaaagtttattttttctactaggcctaatattccccgaatctgttctgagaatgttaacagatatttactaacaaaaataacaatagaactatttcagggaaagaacaggattattagaaattgatttttattaataggatgcttgctggcaggggcaatggagcagttttttaaggaaagaagcataacatactagttattcagttagaatagattcttaatatttatgaaaatcttgtgttttgccctgtctcacttggtggtattgtaatcatctgagaatctatcctataagttatgtgatatatgctattttccttatcaatctatttcagttttgatttcctcatcatcctttgcagtctgcttgttgctgtttctcagttttgacatttaatttcttttagttgtgctttacagtttttctgagatgcctcattgagttttctgtataaaatttcatatctttggcttatcttgcaactcttttagtacctaggtgtcattcttcatcattctattatgaattgaattaaagcatatggcattatttcagaagtgactgcctcttgggcatcattgtcagttatattgtcctaaatattgcatttaggtaataaaaaggaaatcttccttgaaggtaaagttaatattaatagaaatctttccatatgttgttaaagactcttgttatgaagtttaatatgccatttatttaggccttatttaaattcagttgtaaattttttccttctggctccttaccttagtgaactgtcatctcttatcatcatactctttgctcgaaaaccttcatgtgttgctttctaccctcaggatgttgcctaaatttcttgaagtggtatttactgatctggcctacatctacctttcccattagtctcttccttcccacatagttgctttgtcggtatactcctaatagtcttttatttctgtttttcattgtttttgttaatattatattcttgtttcccaatctgtgcactaagtccccttggggtgctgtagcaaacccacagagagtcttcagggtatttcaaaatttcaaggtaaacacagtgacgtctatcagacacagcatgaaccactagctccagatatttcagtttttttttttttgagatggagacttgctgtgtcacccaggctgtagcgcagtggcgggatcttggctcactgcagcctccacctcctgagttcaagcgattctcctgcctcagcctcctgagtagctgggattacaggcatgtgccaccacgcctgggtaattattgcatttttagtagagacggtgtttcaccatgttggtcaggctgttcttgaactcctgacctcgtgatccgcctgcctcagccttccaaagtgctgggattacaggcgtgagccactgcgcctggcctggtatttcagttttaacattagattactacattccttttggtggcattatactgtgcgaaactgaatctttgacggtttctgtgataaaaagcaaatcagtgtgaaacaaatgagggtgatggttaccagtctgattccaagatttgagaattttgcagtgcctaacaggtagaaaatcattaggaaataaacacttttggctgaaacgaattatttaataaatggaatttctttcatcctaggggcaccatgataaaatttctaacataggaaaggaggcatgtgctatatgctgtatgactcttttttctttctagtttgtaaccattttggaagatcatacccatccttcaaagaccaattgatactgctacctgtctttggaggcctttcctgatcccctccactgcagttgatctctctcatgggtattttccagtaatatgctgcttttttactattgctgtttaagttaaactaattgaagtatttatttgaagttaccaatagtggccgtggttttcctattcctccagttaggtataattacttaaagtataacaagagccctttccttctttgtataaaggtgatacaaatataataatagaaaccctatactgtactaaactgcgtaggttgttagtcaatttctttttatttcttttttttcttttttctttttttttgagaggagttccactcttattgcccaggctggaatgcaatggcgcaatctcggcccactgcaacctccacctcctgggttcaagcgattctccttacctcagcctcctgagtagctgggattacaggcatgcgccactatgcctggttaattttttgtatttttagagatggagtttttccatgttggtttggctggtcttgaactcccaacctcaggtgatctgcctgcctcggcttcccaaagtgtcgggattacaggcgtgagccactgcacacggccttgtttgtcaatttctaattcttacaacatccttaaaagatcataggttatgttatccacattttatatttgaagaaattgacgtttagcagtgttagtttttctcacacccacatacctcctgacctttagctattctagttccttttcctttaatattgattatagaatcaactttttgatatcctcaaaaatccattgagagtttggttgggattgcattgaacttatgaatcaatttggggagaattaatgtcttaagaatattgagttttcaaatccatgtacataatatagctcttcgtttatataagttgtttttttttcctcagcagtcttttgtagtgttctacatatatgtcttgcacatatttggttaaatgtgttcctacatgtttcaattttggtggtattgtaaatattgttttcttaattttaattttcaactcttctttgaaaatttatagaaatacattagatttttatatattgatcttaaagtctgagaccttgattgacttacttttaattctagagcatttatgtggattccttatgattttacatatattccttaaacatgcacaggttggtatctagccatagcctcaagggttactctgtagatttcaactcattcttctctgaaaatctttttcacaatttctagtctcctggctctccttgaacacatctctttctcctcattttagtgaaaatgccaggctctatttgccttctttctccctctccatggtgtggaacttgcctcctggcagagtacctgcatgatgtcagggcacaccttgtttctttcctatcagagatcacagtcctaccatgcctgttattcaatgtctgaaaattctgtaggtgtttccttttggttttctggtttacagcacaacagtaattctagagcctgctactcactcatggccagagcagaagttaaagtttttaaggtatactgtacatatgtgaaccaagggaaggtaggcagtttattttagctaaaagaaggagcataatcaaaggttataaacaaggttgaatctccatcctggagaatcaaaatctagtagttgtgactttgtattaggaacatcatcatttttatctttttattccctggcagacatgcattaaatgtttgttgattgagtatcaaaatgataggaaatagattagttggatgttggtgaaacattgtgttttagatgcttacagatgtactaaaattttaacagaaatctttgcaaattacttgttaaattttcctaaactgatttttaaaaatctatttcattctcaattataacatctttactgagattattaagtgctttgaagcagttaacgtggcttttttttttaatggctgtaaaaaaactgaatttttaggcttgttaaactctggttttagaatgacttttgagtggaaatcactgatcaaaagcaaagttctcacattttgtcaatatctgaatgtcagaaatagaatgtcaggcagtttcccatgttgaaatattcgatagtaaaaggatagcaaagttgctgaatatttctactgtttatcaatttttgccttgcaggttcaaataatatttatttgtagtggaaatatttcaattcatttaaatcctgattatggagtagttagtaaatcaggtttaagcctgacagtgagttgatatagctcttatttcagactgtagtttgaacatgtagactctctgattataactaggctaaattatataataatgactttattttcactgaacaaagtttgctattattttgatgacaaattatttaagtaatcatagtaaaagttgctattggctctgggttttatttattttgctatatatagtagacatggttgatcatttaatcatgccttatagataaataaaagtaagttatagaataacacagaaattttctgctaaatttatactttcactaaatttaataacaatagaaattctctgttaaatttatactttcactaattgtagaataaagtattttaagttaggcatttatactgagacattttatgatattaactgcttcatgttatttactcattttgataaatggagtgataatatccaaaatggaataaattaagtttaaattattgttattctttaaaggaatgatttagctacagtatgtttgtcccaccttttaattttgaacattttctaacttacagaatagtaaaatgaacttttctatacctttcacattgatccaccaattgttaacatttcaacacatttgtgttctctctttaaataaatgtatgtgtgtgtattttcctcagaaccattctgaagtatttattccttattcaagaaattaagcattgatactgttttctgatgtgtgatcaagattccagatgtcacagttattctggtagtgtccttgatagctgtttaattttattctcagtccaggatccaataagaatcacacattacatgtattagtactatttctttaatatactttcctcccacctttttggttaaggcattttcttcaagagtccaacccagttgattgtaatatgtgccaccttgtggacttaatctcatgattttaggcaataatagtacgtaagtgacactgtgtatttcccattgcatcacatcgtaaggtttatggctttattgataatgctaattgataatggttaagatagcatccctcagattttttgcttagaaccttcttccctttccccattccatgtttgtgttttccttatcctgttcagcaaacctagttcccaacagcatcaactttatattcatttgctctatcctacaatacgcacaaaatagtttcaccaataacataaccaacaataaacctactaaataaagtttgatttatttgttgtttttgttccttataattattccattaagactgtattgtcataagagcatactgaaaaattatttgcattattttttctatgtgcttatgttacaatttgataccttctttgatttttcattcttgttatactcaacttcataatttgtttttcttctaatggaatttgaaattaaaattaaattttattatttgaaaatgcaaaattttaacatgtttcagaagtcaaatttgtatggaatgctatattcagagaactcttctattcctattcctctactcctttcccactcactctcatagaaaagcatttttcatttctagtttattctttctgtgtttctttttataaaattagcaaacacaaaattatatatacattctaatatatgtatatagtatagtatctatactaaaagaatatatatggttgagtgaggtggcttgcacctatagtcccaactactcagaagactgagctgggaggatctgttgaattcaggagttcgaggcaagaatatacacacacacacacacacacacacacacacacacacacacacacattctcttttatgtaataaaaaccataacattaactctaccatcttaaccatttttaaatgtaccaattagtatacgcatgttgttacatagtcaacctctagaaatttttcatcttgcaacactgaaactctgtacccattaaactcttaattctctgacttccctccctgacgtccttggcaaccaacattctacttatgtttctatgattttgactacttcagatacttcctatgaatggaatcatacaatatgtgtcttttttgtgacagaccttatataacttagcaagttcttgatgttcatctatgttgtagcatgtgacaggatttccttcttttgtttctttatcctttaattgttgatagatgtctgggttgcttgtacttcttggctatcatgaatattgctgcagtgaacatggacatgcaaatatatctttgagatcctgctttgaattcttttgactgtatacccagaagtgaggttgcttgattatatgttaatttaatttttaatatttctttcaggaacttccataccattttagtagtggctgtaccatgttacatttccaccaacactgcacaagggttcattcacttctccacattttgccagcattttttgttttctgtgttttcggtagtaaccatcctgatcagtgtgaagtgatatctcattgtggttttgatttccctgatgattactgatgttgaacatcttttcttgtgcttattggccatttatatatcatttttggagaaatgtctattcaagtcctttgcccattttaagatcatgttatttgtatttttattgttcatttagaagtttgttatatattctggatattaacctttcattggatatatggtttggaaataagttgccttttcactctgttgattgcctcctttgccatgcagaagttaagcttgatataatcacatttatctatttttgcttttgttgcctgtgcttttgttccatatttatgaaatcattgctaaatccaatgtcctgaagctgtcccccatatttgaaaataatatatattattaagttttattttttaaacaaagctttttacctttgagacttgatttttttttgaagttaacaaaatatcctggaaattactttgtatagaaggagtgttccacagagcttttcctttttttgtgttgttttgctgggatttttgaatggctgtgtggtattccattgtgtggatatatcataatttaatcgactgatcttctacaggtggacttctagtttatttccaacattttgccattacaaataacatctcaatacttatatatgtgttgttttatattgtggatgagtctgtagaagtgggattgctggtcattaagctgttactatgtctcattcttacagttctgtctttgttactttttcctctcctcatccttttacctctcaaatatgcatgtatttcttttctattccaaatatttgagaacagattttatcaaaatctattttgatatcttttgactttgtatgtagattatttgtaggttattttgctacctgtaagtctttgaaactaaacaggtgttacctatagaatcactatagaatattagaaccctcagggatttgagctaattataaaaggtaaaaagttcaaatctgtgaaacatatgcatcttacaagaaatccattaaagcttataataattacttcaatgaaaaaatgagatatttgtaactagaactgtaacactatttctgaatttttaaaagaatttttttagatatgagcatgttttagcttaatttatatatgaattactacaataagtatgacaatcatagtaacagccacagctaatatatgttgttgactatgtgctgggtaccatgctcagcaatgcaagtacattaatttacatcatttcaattagtcctcaacgaccttatgagatgtatttgtaattatatctccactttaaacatgagtgaaatgagaaatgttaagagatatgctctaacatgctctaactcatgcagctagtaagtggcagaagcaagatttgaacccagagagtcttcaatcaagatggattctgctctttttatgacaatgctagacttcttatattgggacccactattattttcctatatcaggccagcatttgtcttaaggtctgtatgattttagctgctgagtccttaacaactttatgtactttatttctctccccaaagcagtataagatattacatggttgttatattaagtttttttaatcgtaagtgatagcacagaattgaaatcccattcataacagctacagtttctcacaaagcattcttgtcacatcactatctgtggcagaatattaaactatgtgtaccatttttttgccccattaaattatttatgttcctgttttacagtggatgattcaacagccacacaaagcagcaacattttttggatgcattgggatagataaatttggggagatcctgaagagaaaagctgctgaagcccatgtggatgctcattactacgagcagaatgagcagccaacaggaacttgtgctgcatgcatcactggtgacaacaggtcagtgtaattccaagggaaccactatactaattggctattttaacactggtaaaatatgaattccaatgtgaatttggaattttgactttataattccttttaatgtttgataaatgcttattccttatatcagttttcctgtattgtttttaaatttacttttgttaaacatgcagttgaattcatgaggcataatggaataaaagtttgaggttatttagtccagtctctactttttataattagaatcagaaaaggctgatagcttgctcaatgccttgtagcttgctcaacaccttgtagctaatttgttgcaaaacttgaattagaaacaatgttcttttcaccatatcctgaggttggaatacgagagagagagacagagagacagagagagagtgtgtgtgtgtattttatgtatataaaatacaacattacattcaggctcgtaagacttagtcatctaaatggtcatctaaaccatttctggcaaatagtaattcattcatattgaataaactcagtcgtgggtagtataccactaacaaaacaaccaagtatatttctatacacccttacttattagaaaagtattcttaatatgaacttgaaatatctctctcaggcccctccatatattggttggttgttcttttgtacccacatggagatactccttcagtgtattcatgcactgctaacgttattaccatatcagcacaggcttttttcccctttgcaagggaaaaacaaaataactgccctagctattatattgttgggataatcaaagatgacctctttttaaatagtgattcactagaaattttgcattacttatagttggaaatatgtagtctgtcctcctccattccctatctcctttcttttcccatcttctcttcctttctttttttcccttttcatcctcctttattttcttccccctctccaccacgaccttgctccatttcttctatttacccactttattgctcactacttgaccttcagcagaggtatattaaggaatggactattctagagactggggatcaataagcacagtatttactaaataaccaaaatacaatattcaaaaattattagggtatgaaaggcattttcagatctttcctttaattttgttttttatatacaggagaactttatggttttaagattacagtaaacattgaaatatgggattcagggattttaaaaaaaaacaactaaaaatgttgaaatatgtttgtttagacctttgcccttagttttcccaagaccagccttaatctgtaggtgcaaagttttcccattagtgagaagtaggtcagattttcttctgatatcacttaggctacagtaaaattactaaattgttttagtatgctaaattgctgtcctaaagaacagttatggttgggtgcagtggctcacgcctgtaatcccagcactttgggaggccgagtcaggtggatcacctgaggtcaggagttcgagaccagcctggccaacatggtgaaactccgtctctactaaaaatgtaaaaattagccaggtgtgcacctgtaatcccagctactcgggagacgaaagtaggagaattgcttgaacctaggaggtggaggttgcagtgagccgagattgtgctattgcgctccagcctgggcaacagagcaagattctgtctcaaaaccaaagagagagagagaacagttatgataatattagatcttctggatgtcaaaaacttaacttttatactaattttatggttatagtgatattgttgagatgatatgggactcaaaaattggggagaaatcttcagtatctaaatcattatctaaattctggaagctaatacagttggatcaattgttttggataggtccagtaacctttgctgccactatcaaaaactcagaaattggccgggtgtggtggtcacaccttgtaatcctaacactttaggagaccgaagtaggctgatcactcgagctcaggagtttaaggccagcctggccaacatggcgaaactccatctctacaaaaaatacaaaaattagctggggatggtggcatgtacctgtggtccccgctgcttgggaggctgaggtggaaggattgcttgagcccaggaggttgaggctgcagtggactggggtcgtgctgcccactgcacttcagtctgggcaaaagagtgagcccctgtctaaaaaacaaaaaacaaaacaaaaaatttcagaaattgaagtgtttgggtaatgcagtatctttcttgatccaggttcttcctcttcaaagtcagaatcaaatacgttgggataataagaatactcatatttttctggtcgggcatggcagctcatgcctgtaatcccagcactttgggaggccgaggcgggtggatcatttgaggccaggagtttgagaccagcctggccaacatggtgaaactccacctctactaaaaatacaaaaaaattagccgagcatcatggcgggcacttgtaatcccagctacttgggagactgaggcaaggaaattgcttgaacccggaggcggaggttgcagtgagccaagacggagccattgctcttctctagcctgggcaacaagaacgaaacttcatctggaaaaaaaaaaaaaagaatacttttatttttcttttggagaaactgtagtttcccatcaaaaagtagttttattatcagaatagagtttagtatctggtaccagaaatgtttgcttttatttggtagccattttgtcaaaattttcctaaagtcataattactaaaatatttttataaattaggtctaaattttcttaagtttgtaatatagttattttgtatatgaatatgttgatgcatattactctttctttccttcatttacttgaacataaacagatgtatcctttagtagtaaattggcagatggatgagtggaaatacgttttggaagagaattgaggtttttttttttaacagtgtaatcgaacatattaccaaagtctgaaatgataagattttttttgtaagctataactgttacaatttaattagaaaaagagaaaaattggcaagtaattttttaaattctggagcagtatgaggaaggaaagtatttttatttataatgtaaataattattgtatttatttttaattaaacaagccaagtgacacttgtagcaggattttatttatttatttatttattttttagagatgtggttttgccttgttgcctaggctggagtgcagtggcatgatcatagctcattgcagcctcaaactcctgggctcaagcaatcctcccacctcagcttcctgagtccctaggactataagtgtgcaccactacccccagctaatttttaaaattattttgtagagatgggatctggctgtgttgcccaggctgacctcaaactcctggcatcaagcaatcctcccaccttggcctctgaaagagctgggatttcagctttgagctactgcacccaacctgcagcaagattttaaatgcagtatcctgcttagatattccatttctaaaattggaccagtcaggggacttttcaactatagaaaacaattctaattgatttcagcccttagaatgtaatggtttacaaattaattcctcttagcgaatatggtctacatttataagtgtcttttacgaaattaattccatatttggcttttaaaggcttcgattaaatagacaattatagtatgttgatatttatttttataaagatatttttctacttaaaaaatgtttttagttgcatagatttctttttatataatgagttagccttatttcttaactgcattttgaactattaaggtgtaaaaagtaggtcctattttactatcaaaaggcaacttaaatgccaatttctttctcaaaataccaggtgttgtttagaacaaaaattatcatagatgcctcagaaagttctcaaaacaaaattattatttatatttatttaaaaatcaataacattagttttgaagaattaattaaaatgtaaattttaaactttgcaaaaaatattggtaattatctattgaaacatatgctaagtttgactataatattacttgcttattctttggttgttttaggtccctcatagctaatcttgctgctgccaattgttataaaaaggaaaaacatcttgatctggagaaaaactggatgttggtagaaaaagcaagagtttgttatatagcagtaagtacttacctaattcaaatctctagtacatatttacatgatggattatagttgttgtctgatatatattttaaaataattatcttttatttaccctgcaaattatttatctctctcaaagcatatgttagattcactattgtgaaaatagaacagaaatcattatctttctatgggtaacataatttgtattatttatcttcaggtctacctatttttggatacattatgcataggtgcttgccaaccaagcgcagaattctatattaaatcagtttccaaatatattttaaaataattctacaaacttacatcttacatttgtaggcaacttgcattgtgcagaaaaatattagtagtataaatattcactgcaaatagtttgagctgaattgcttaaaaaacttaattgctatttattccatagtaattaccatgacacctcttaatttaatatttcagaaacattgatcgtgacaaatctcttaaatctgggaacaagggcagggtgtaatttgaattattaagtcttctgacacaaaaataattggttaagaatttatttctaaaataggatggtactaaaaattctgaattaatcaccccatgattaccttgtttttatttaatatgtgttaaatgtggctttacacaaataagtagatacctatgaaaaaagcatctcgtatgcatgtaatatatggttttggtataacagctgctgccatttcattacctgagctctgtgaaatagctggtaagatgtgtaaaaaattgattaccctactaggaggaacatgtttattgaaaatataattatttctttcagtctaatgttaatgtctcctacagcatgtttgtgtgcactgttctaggctttacaacattgttattgattcctctgtataccaaatcctatccctttataactgtcaaataaatgcttacattgagaagattatataatggaaagttatgctatcttttctgccagtatgtgagaaaaacatttcaagaattaaatattttacccctttattatttccatttcattttatttctcaaattggtctcatgttctttccatttttcaaatcttgatactgtatttcttgtagtgtgattctttagaggggatttatgtactatttcaaaccatcttacacttgaaagtctgattttcaaaaagcaccatgtttagaatttggcataatttatatatacttgttgactatgaaataagacagtgtattctgatgaaaaagtatatttaacttgacaattacagtcttctatgtttcaatatatagttgttcaatcctgaattgtgagccaacttgcaaacaactcatagttgtaatgattatacagtataacatgtctagccaactttgggtgaatggaacttttatgaaagtgtagattcaacttgcagacaactcatagttttagcatttatgcactatattgtatctagccatatttgggtgaatggagttttacagtagtattaaatatttatacttacgtgcaattttgtacagcataaagtgatcagcttttggtgaaattaataaggcaaatgatattatttttgagatttgggtggtgtattcagccagaagaaataacaaaatggatttcagttgttatctgtgatacaagtgttagcttgtagcttctgtttcagcagtttcataaaaagaatgatctcttacattgccaggtaaatctgtactcttctcctagcttggcttattccaaaatagttctgaaaatagtagactcatattggatacctgggacgctgtatattcttagtgaacattcaacaaatatttacttggtgaataactaagagcataattcgtatttattgaaatctgtaaacttccttttgaaatacaatgttatttccacaaagacactgcaggttttgcaaatctgtaattccctttgatttcagagcattccgaaatgatgtgtagtctagtctagttttttcttagcatatggtcaaaccataaattaagtgggctgccccatactttctggttctatgaggtcaacagtctcattacattatcatcataaactaatgaggtttaagaaattaaagttctgggggctctttaattctaaaatgtttttgatctaaggaagcaacgcagtttatctattcaacaaatatccgtaactaaaacatctgtctgcatcacataagctaaaccagatctacatactcagctctgcttcttcacactattctccaaactagcagtgtttcatgaatattaagaaaattccaaaccttcttcttcattttcttcaccatataatttactgagtaagttcacactggaaaccttcctgactgaaaagctaaaattgaatatggatacaccagcatcctcttttggtttaaatacagtgccaagatcttttaaaatttattttttacctttcataataaatgtctcattttatgccacgtaaactcagtttttccatgtttaaaccagcttctcagattctttgttagcaggtaattagggactactggctatggtgactaggtaattatgtttttgaaaacataagtctcaggttctcttcaccttagaatcagattgggatatatctgttttttctcacttaagaaataatatttcctggcatagtggtttatgcctgtagtcccagtgctttgggaggccaaagccagtggattgcttttggtcaggagatcgagtccagcttgggcaacaagtaggtctctaaggacttgctttatgaatctgggtgctcctgtattgggtgctttatgaatctgggtgctcctgtattgggtgcatatatatttaggatagttagctcttcttgttgcattgatccctttaccattatgtaatggccttctttatctcttttgatctttgttggtttaaagtctgttttatcagagactaggattgcaacccctgctttttttttttgttttccatttgcttggtagatcttcctccatccctttattttgagcctatgtgtgtctctgcatgtgagatgggtctcctgaatacagtacactgatggatcttgactctatccaatttgccagtctgtgtcttttaattggggcgtttagcccatttacatttaaggttaatattgttatgtgtgaagttgatcctgtcattatgatgttagctggttattttgctcgttagttgatgcagtttcttcctagccttgatggtctttacaatgtagcatgtttttgcagtggctggtacccgttgttctttccatgtttagtgcttccttcaggagctcttgtaaggcaggcctggtggtgacaaaatctctcagcatttgcttgtctgtaaaggattttatttctccttcacttatgaagcttagtttggctcgatatgaatttctgggttgaaaattctattctttaagaatgttgaatattggcccccactctcttttggcttgtagagtgtctgcagagagatctgctgttattctgatgggcttccctttgtgagtaacccaacctttctctctggctgcccttaacattttttccttcatttcaactttggtgaatctgacaattatgtgtcttggtgttgctcttctcgaggagtatctttgtggtgttctctgtatttcccaaatttgaatgttggcctgccttgctaggttggggacattctcctgaataatatcctgcagagtgttttccaacttggttccattctccctgtcactttcagatataccaatcagatgtagatttggtcttttcacatagtcccatatttcttggaggctttgtgcgtttctttttactctttttttttctctaaactactcttcttgcttcatttcattcatttgatcttcaatcactgataccctttcttccacttgatcgaatcagctactgaagcttgtgcatgtgtcacgtagttctcgtgccatggttttcagctccatcaggtcatttaaggtcttatccatgctgtttattctagttagcctgtcgtctaatcttttttgaaggtttttagcttcttttagatgggttcgaacatcctcctttagctcggagaagtttgttattacctatcttttgaagccttcttctctcaactcgtcaaagtcattctccatccagctgtgttctattgctggcgaggagctgtgttcctttggaggagaagagacgctctgatttttagaattgtcagcttttctcctctggtttctccccatctttgtggttttatctactttggtctttgatgatggtgacctacagatagggttttggtgtggatgtcctttctgtttgttacttttccttctaatagtcaggatcctcagctgcaggtctgttggagtttgctggaggtccactccagaccctgtttgcctggctatcaccagcagaggctgccaaatattgcagaacagcaaatgttgctgcctgatccgtcctctggaagctttgtctcagaggggcgcccagttgtatgaggtgtctgttggcccctactgggaggtatctcccagttaggttactcagggatcagggacccacttgaggaggcagtctgtccattctcagatctcaaactttgtgctgggagaaccactactctctccaaagctgtcagacagggacatttaaatctatagaagtttctattgccttttattcagctatgccctgcccccagagatggagtctacagaggcaggcaggcctccttgagctgctgtgggctctacctagttcgagcttcctggccgctttgtttacctactcaagcctcagcaatggcgggcacccctcccccagcctcactgcttccctgcagttgatctgatagcggactgctgtgctagcagtgagcaaggttccatgggcatgggaccctccgagccatgcgtgggatataatctcctggtgtgccgtttgctaaggccattggaaaagcgcagtattagggtgagagtgtcctgattttccaggtaccgtctgtcatggcttcccttggctaggaaatggaattccccaaccccttgcgcttcccaggtgaagcgatgccccgccctgctttggctcacactctgtgggctgcatccactgtccgacaagccccagtgagatgaacctggtacctcagttggaaatgcagaaatcacccgtcttctgcatcactcacgctgggagctgtagaatggagctgttcctattcctttttttgttttgttttgttttgttttgagatggagtcttgctgtgtcatccaggctggagtgcagtggcacaatctctgcccactgcaacctccgcctcctgggttcacaccattctccttgccttagcctcccaagtagctgggactgcacgtgcctgccaccatgcccggctaattttttgtatttttagtagagacggggtttcaccatgttagccaggatggtctcgatctcctgacctcatgatccacacgctttggcctcccaaagttctgggattacaggcatgagccaccacacccagcctaattgttttttttttttttaatcagctttgttaatatatgtctcacaacttacaatacatacattttacttctacatatatattataaacatcgtaaccttgctgctatttttgtttaaattgtcaaatatatattttaaaagacttaataagaaaaaattcatatttttactcaggtatttatcatttctagttctctttattccttttggttagaattagatttccatctggtatcattttccttctgcctagagggcattctttaacatctcttgtatttggatctgtcagtaataaattctttcagcttttgtatgtttgaaaacatctttatttcaccttcatttttgaaagacatttgtgccagatatatagttctagtttgacagtttttcagtacatgaaaaatgttaccccattgccatcttacttgcatagttcttgataagaaatctgacattcttttgttcttcaatgtttcacaacccccattccccaaattttgctgcttttaagatttttcatatgagaccaggtgcggtggctcacacctgtaatcccagtgctttgggaggtcaagatgggaggatggcttttgaggcatggagatcaagattagcctaggcaacatagtgagaccccatccttacaaaaaatacacacagagaaaattactcattttgatcagtttagttatgatgggccttagtgtattcttcttcatgtttcttgtgcttgggttttgtttaacttcttagagctatcggtttttagtttttattatgtttggaatatttgcagccattatacatcttcaaattggttttctgacccttttatgccacttgaagttgtctcatagctcactgacactctttttttattttgtttctttctctatgttttattttggatacctcctttgctgtgccttccatttcactaatattttcttctgtaatacctgaactgttattaatctcatcaaataaataaagctaaatatttcttactactgggggaagacttttcttagtactccatggcacagagcactaaggggtccctaatctctggtactgcaactatatcagttcctgttaggaaccaggccacacagcaggaggtgagtagcaggccaccaagcattaccacctgagctccacctcctgtcacatcagcggaggattctttttttttttttttcaaatgtgaaaaatctaattttattcagtttagattaatgtatagctatacactctggactcttaatgaaacctttcccattctttttttttagattttattattatactttaagttttagggtacacgtgcacaacatgcaggtttgttacatatgtatacatgtgccatgttggtgtgctgcacccagcagaggattcttataggggtgcaaatcctattttgaactgcacaagcgagggatctaggttgtatacgtcttatgagaatctaactaatgcctgatgatctgaggtgcaacagtttcatcctgaaaccacgcctcctacccgtccgtggaaaaattgtcttccacaaaactagtccctggtgccaaaaacgttggagactttgatgaaaaaaatgatgagtttttctgctctaggtctttgaaacagccactatttccaaatgtgtatgtgcctcaggtactgttccttctatttttttttcctcttaatacttttggatgtttctttcccaggtactgaccttaagaaaagaccctctacagaattccaggtttctctgtaaatctttctgttctctgatattgtggtctttcaactcttaactgctctgaaattcccagactctcagttgtatttcctcaactcactggcatctactacagttctccttataccatattctggaaactcttgcaataaactgctgtagtcatatggctgacctccattgtttcccatctctcagagatacgtattttttattcttgatgtccagtgtattaaaaaccattgtttctagttttgctattgttgtttcatgatagggagtaaatctagtttctgttcctctactgtcttctgctttgcattgtttttgaaaggaagcctgctgccattcctatcattgttccctcttacctaatatgtcttttaacctcctttatctgcttttaagatgtttatcactgattttaaacaattttattatgatgtaccttggcatagttttatattttgtgtggttggggttttttatagtttcattcactttggaaattatttaacaataagttttctctttccacctccatctacctttgggactccgattaaaataataataataataataataagaagaagaagaagaagaagaagaagaagaagaagaagaagccacttgtagttgacccatgtctcagtgattctgttttcaatatttttgtttttctatctgttcttcattttgaataattactctctcccctattttgtcttttcttttttatttttatttttattttttgagatggagtcttgctctgtcacccaggctggagtgcagtggtgcaatcttggctcactgcaacccccgcctcctgggttcaagtgattctcctgcctcagcctcctgagtagctgggactacaggcacgcctcaccacacccggctaatttttgtatttttagtagaggtgggttttcaccatattgtttcggctggtcctgaactcctgacctcatgatctgcttgcctcggcctcccaaagtgctgggattacaggcgtgggccactgtgcctggcctctttcttttttttttttttttcagacaagttctcgttccgtcgcccaagctggagtgcagtggcacaatattgggtcaatgcaacccccacctcagcctcccaagtaactggaactgcaggagtgcaccaccatgcctggctagtttttgtattttctctagagacaggttttgctgtgttgctcaggctggtctcaaactcctgaactcaacttatctgcctgtctcgacctcccaaattgctgggattgcaggcatgagccgccatgtccagcattgaataatttctattactctgaagtttactaattatttcatctacaatgtttaatctgccattaatctcatccagttgacattttatctctgacattatagttttcatctcttgaactttgatttggacctcttttactcatgccatatctctacatagtatgcttatgttgtcatgtgctttcggaatgttgttataacaattgttttaatattcatgtctactaattctgtcacttttttttaatctgattaccttggtattggtttttcctgattacctgggtattcattgtttcctcatacatgtgtactgaagactccaaaggaatcccttgcatatctcgagttctcactttccacctctttcttctccaagcagctctgtcctctccagtactctgccccagcatgtggtagccagcttggcctccctgaatggaaactacttgactctatttaggttcttccttcccgctctgcagcctgggaactctattcaaggtgtaagtttgagtaattgtagcgcttaccttattctgccccttctttgattattatccaatgcctgaaaattgtgttttcatgtattttgttcattgttagttgtttaagatgggaatataaatctgctccctggtccttcatagtggctggaagtgcaaatctctaggttgattttggtttttccctttttcaggtaactcgctttttttttcaagaatgcctaatttttttatttgaatttgagtctcagtctgttgcccaggctggagtgcagtgacacaatctcggctcactgcaacctccatctcctgggtttgaacgattctcctgcgtcagtctacccagtagctgggattataggcacctaccaccatgcctggctgagttttgtattttttttttttttttttagttgagatgaggtttcaccattttggctaggctggtcttgaactcctgacctcaagtgatccacccgccttggactcccaatgtgctggtattacaggcatgagccactgcccccagcctgaatttgaatttgataataactatgatttatctctatgcgaattctgtattgagttttcctcgaacaatgtattcattttaaactgtagatttcattcccagttaactttcttgtccccaaatattgtttctcctttacttgacctattggagtgtcagaaaatgatcataaccatcactgataaatgtgttatggggaatattagagtaaaagcagaaattccaagttgtggtgagaaagtacagtagaaccttgaacaatgtgagggttctgggcactgaccccttcgaaaatccacatacaatgtttacctcctcaaaaacttaactactaatagtagttaattggaagccttactgataacgtaaatagttgattaacacgtattttgtatatgtattatattctgtattcttacaataaattaagctaaagaaaaaatgctataatatcatatggaatgaaaatatattattattcattaagtggaaatggatcatcataaaggtctttatcttagtcatcttcatgttgagtgggctgaggaggggaagaagaggaggagtggttggccttcatgtctcagaggttggcagaggcagaagaaaatctatgtataggttgacctgcacagttcaaattcatattgttatagtatcagttgtaatcttaaattcatcttcaggttgatttagtgtcaaaattccctcaaatattattctagattctataaaatgttctagataccattttatcgcttaaaaataaatgtgaaagctctcagctaagatatagttgttcatctatgtgtaattactagttttgtaattttttgtaatttcttagtcacctctgcatagtgtttggattacattgtgagtacagtaggattttgtttagaaatctatgcgttatttcaaataacatctctttatgataggaaaaaaggttccaagtttgaaataacactgtgaagaactaatcaccatgcaagtttaggcttattatggggaaatttttaaactttaggtattaaaaagatttttaagaaatagattttaacaaactttcagtaccttgtgacttaccctgcgtaaacaaggtcagccaaatttgtaccctgtttcatggattagaaattaaacactataagtgaaagaataataagtcatatcttgtcaataattttgtgagagtatgagacttgtggtgagttttcctttagcactcatgcctattttcttttttaaattattttttcagttcctatgtcttattacaggtcttctcttttcctctcttcatttatttataactctgtcttgaccacttatatctgttttcggtctagaattttactactttggagaatgtggtttttgtgagggtagagttttcaaatgtcactaatgtttgcttctggaataagggaagtatgattataggtcagtagaagaaacatggtatgaagaaatgtacagccttggtggtaagcaatagaattcatacttacaaagaaacagaagtatatgtatattaaaggcaagtaagaatcactaccaaatgtttacattttacatctcctgctttgtttgccctataggtttttcatacctatgccatgagtaacaatttttcttagtaaaactttcatttatactcagttacaattaaatatctttatcagtaatctaaaagcaataaagcccttaaaatgaggtagtgtgataaattataagaaatctcatctaagaaatcatatgtttgaaattttacgtgtcagtaatgtggtttgtgtccattgaattaacaagttagaatgaatttataattaaataaataatttctatttttttaggatttggttatcttttggcagtatttaccaaaagacatggttacactaaaacgtgactagaaatttaaaaagattgctcaaaatttcatgctcagaatttagaacgtgccatctagtattctttgctctgtcatgaaaagatttgagaaagtttcagtgaaagtgaattaagttgttttgtaatggtaacctaatggaaattgaagtaatttttttttaaaaaaggtaagtattatttaggccaggcacagtggctcaagcctgaaattccagcccttcgggaggctgaagtgggtggatcacctaagatcaagagtttgagaccagcctggccaaaatttttggtagagaccagaccatctctactaaaaatacaaaaattagccaatcatggtggtgcattccttagtcccagctgctggggaggctgaggtaggagaatcgctcaaacccaggaggcagaggttgcggtgagccaagatcgcgccactacactccagcctggctgacagagtgagactctgtctgaaaacaaacaaacaaacaaacaaaaacttacttaaagtgatagctttaaaccttattcgaccatggaacaagcctttgtaacataatctatactgttacaataagtacactttggcagagtaagtgaactaatgatttttttttataatttaagctagtctgtgaatgacagttgattaaataatgtcacagctctttatatatagcattaaatagagttcaaagtatttttggaatttattaatttataatattcttctgtgattattaaagaggtgggatagctaaactttttctcaccttttatcattgttccaagtgcagttttgaactcgtatgtgttagaactcccattatattggtcaaatcgatgatcaccatatgactttattcctgcatttttgcctcaaatttttaactatcctattctggactgcttcattaacttcattagggattaactatgaatgtttaagcctttattttacaatgtccttgcaggtgtccttaactgtttcatttataaacacagagaataaaatgaaaaaaaaatctgtagagttgtttgttctatttggagcttttcatgttggtgtaaaattcctgacacttaacacatatgaatctttttcattcatgtttaataattttatttgagagtcacttcaagtaaagcccaaactgtgttaacatttgagttaagcaaagacatctttgcttaacaataaagcaaatatcacaataaagcaagtcacatgaatattttggtttctgaattcatataaaagttatgtttacactatatggtactctcaagtgtgtggtagcattacatctttaaaaataaacatactttaattaaaaatactttgttgctaaaaaatgctagtgatcatctgagcctttagcgagtaataatctttttgctgttggagggtcttgcaccagtgttgatggctgctgactgctcagagtggtggcttctgaaggttggggtagctgtgacgatttcttaaaataagacagcaatgaagtttgccacatcaattgactcttctttcataaaagatttctctgtagcatacaatgttgtttgatagcatttacctacagtagaacttctttgaaattggagtcagccctctctaactctgttgttgctttaacagttatgtttatgcagtattctgaatttttcgttgtcatttcaacagcattcatagcgtgttcaccaggagtagattccatgtcaagaaaccactctctgtgttcatctataagaagcaatttctcatccattcaagttttatcatgtgattgcagcaattcagtcctatcttcaggcttcacttctaatactagttctcttgctatttccatcacatgtgcattgacttcttccactgaagtcttgaagccctcaaagtcatccatgagggttggaatccacttattccaaactcctattaatgttaatattttgaccacctcacatgaatcgtgaatgttcttttttttttaaacagggttttactcctgtcactcaggcagggaagtgcagtaacaatcactgcacattgcagtctcaatctcccaggcaagctcaagcaatcctcccacctcatcatttattttatttttgtagagacgaggtctcaccatattggccaggctggtctcgaactgctgggcttaagtgatcctcccactgcggcctcccaaagcgctgggattgcaggtgtgagccaccatgcccagcccatgaatgttcttaatgacaactggaatgatgaattattttcaggaggttttcaatttactctgcccaaacccatcagatgagtcactatggcagctatagccttatgaaatatattacttaaataagatttgaaagtcaaaattactcattgatccatgggctgcagaatgaatgttgttttagcagccgtgaaaacaacattcatcttcttatacgtctccatcagagcccttgggttaccagatgcattgttaatgagcagtaatattttaaagggaatctttttttctgagcagtagatctcaacagtgggcttaaaatattcagtataccagctgggcacagtggcttatgcctgtaatcccagcactttaggaggccaaggcgggaggatcacctgaggtcaggaattcgagaccagcctggtcgacatggtgaaaccacatctctactaataatacaaaaatgagctgggcatggtggtgcacacctgtaatcccagctactcaggaggctgaagcaggagaattgcttgaaccctggaggcggaggttgcggtgagccaagattgcgccattgcactccagcctgggtgacaagagtgaaactgtccccaaaaaaaaaaaaattcagcataccatactcaaacaggtatgtgttcatccaggctttgttatttcatttatagaacacaggcagagcagatttaacataactcttaagggctctaggatttttagaatggtaaatgagcattgacttcaactgaaagtcaccagctgcattagcccctaaaaaaaaaagagtcgtcctatcctttgaagcttcgaagccaagcatttacttctttttagctgtaaaagtcttcaatagcatcttctgccagtagaagactcttttgtctatgttgaaaacctgttgttcagtgcagccaccttcatcaatgatgttggcaagatctgggtaactcttcagcacctgctattttaccttgcacttttatgatatggagattgcttctttctttcaacctcacaaattagcctctcttagcttcagacttttcttgcacagcatcctcacctctcagctttaacagaattgaaaagagttaaggttgtgctcgggattaagctttgacctaagagaatgctatgctggtttgatgttctatacagaccagtaaaactttctccatgtcagcaataagcttatttcactctcttattcatgcgttcactggagtagcacttttaattttcttcaagaactttttctttgcattgagaacttgcctgtttgttgtgagaggtcaaactttcagcctgtctcacctttcgatatgccttcctcactaaactcaatcatttctagcttttgacttaaagtgagagacatgcaactcctcctttcacttgaacacttagagaccactgtaggattattaattggcctaatgtcactattgttgtgtctcaagaaatagggaggccttaggagaggtagagagatggggtaatggccagctggtagagcagtgaaaacacagcatttatcagttaagttcaccatcttctatgggtgtggtttgtggcatcccaaaacaattacaataataatatcatagatcagtgatcactataaaagatataaaagtttgaaatattgaaagaattaccaaaatatgacagagatccaagcgagcacattctgttggaaaataatgacaccatactcaaggcaggcttgccataaaccttcgatttgtaaaaaaaaataataaaaaggtatctgtgaagtgcaataaaataaggtatgcttataccaaaacagacttaattatgctatttcttaccattagtgttagagttcagtttctaatgtttttcattttccatatgttattgatgttcagtgagttacacaaattatttactgttgttacttccaccttagtagggagaatctttgatttttgctggataaattttcaaacaagagtgtgattataggctggacgtggtggctcacgcctgtaatcccagcattttgggaggccgaggtgggcagatcacttgaggtcaggagttggagaccagcctggccaacatggtgaaaccccctctctactaaaaatacaaaaattagccgggcgtggtggcgcatgcctgtaatcccagcacttgagaagctgaggcaggagaatggcttgaacctgggaggcagaggttgcactcctgcctaggtgacagagtgagactccatctcaaaaaaaaagaaaagaaagaaaagtgtgattacagagatcctatttgtgtttatttttaatttctctagaatttgttttcttcaataaataaaattctaataccagttttttttgagtaacactgtgatttttatacagaaagactttctccaaattggagaatgtactcttttattcctgtaatttttcttaactcttatttttggcagctaccaaaagtaaaactctctaccaagacagagaagaaatctttgggaatattaagtaatgttatttttcattacacggactaacctttttactaagaagaattgggatagtattggttatgggagcttaggagccctaaagataaagattggaagattttgtgttgtggacttgtggcactgtaacaaagtctgggaattttatgtgagattggaaaccacactatgtgctaattgcctcagaatggtaagaaaataagcatatgtatagcatttagttgttaagacagtaggcacttatgcagagccccaaatgaattaacaaatcatctactgaaatattttcacttctgtttactttatgtattttagaccaatcagcagttgcttgagaaaatgaaatgtttactaaatctctttaataaacatgtttaagagaggaaaaacttataaacattcagatggcagtgtacatttttaagtgctagttgtcatatctttgaaattgtatgtaaactggacataaacaatcaagtgtctacagaatggtatctgtcttccaatatatttactgaagatattatagaatctttatagtttaatatgatttaccccacatgttctgttgttgctatcttttcagataaagttgaatttaatctttcttatcagcttttattgaggtatttatgaaccattgagttcacccacttaaaaaatatcattcagtggctgttagtgtatttacagagttctgctaccatcactgtaatctaatgttagaacattcacatcaccacagaaggaaatgttatacccatcagtagtaatgctccataccccctggatttaatcttatatccacatctctcataatagtttcagtggtatctagttattatgactacaaatgatgcaattgttcctgattacacaaataatgtatttatgtctttattgttggcatgtaatggaagacataataagtctgctttgatctcttgctcttacctatttctctattgcaagtgttataaagagtcttttaagcttttgctcatatatataaatatatatatacatacatttatatatacacacacatacatatatacacacacacacacacacacacacacacacacatatatgtaatgctaccgtgtttgagggtcatgagggtcagttttttgaaataccagtttttttctgatttaggtggatgacatggtacgtgaagcttaaaaaaaaatttggtaaattggtatgaaaaaatgagaggacaacgtttttcctttctggtacttagcaggaaggcaagttcttgtatgaacccatatttcctgttacccattttcagaccaatattggtttctcatctatataatagggatcttttgactctaacctcttaaatctatcatgtgttttctttcttcaccttggaaatagcttcttgaagccccagacttctagagcacattcatattaactaacattgtcctggtttactagttagggatattagtaaatcctaaatagttgaagacgttctgaaagatatattgctgctttttaaaaatttatttatcttgttctctatacggatttctggcacaaggttggtttttgtttttgtttttgtttctgttttttttttgtcaattgtggtaagtccatggatgcttttctctataactttcccattttcccttatcacaccgtcactgcaaacatctaatttctgtccagtctctcaactcttttcagctctgctgtcctaactaatcattttttgtattcatctttcaaagtatttgtttctgtcttcattctataagtaacaagattatttaaggttattttgtattacagaaatagtaaaaatcaaataaaatatcaaatgtagaatagtccaccaaaaatattttatttcatcttttccagagaggtacacatataataaagtaaatgagcattatatattttattattaatcctcaataatatatttttcacaggtatgttgcttcttgtaagtttaccttttttaatgtgaaaactacaataaactaaattaaattttaaaaatattttacttactaaagtcaactgatgttttcctggtagattgataggcttcttgtggtagcttttaatcatttgcaagttttgagcccatttctaaaacttttctcattgtaaatatgtatttcctttcttatattaactgagaatttgtttttataaaaataaagtggggaatcagactcaaggtgaaatgttgtagacttagtgccagcaataagcagaattatttaaaatcattcaaatatctttaattcccttgttgtctttttcaaaaactgtacattttaactacattaatataacggaagactttttaaggcttagttttcctttatagatattccctaatttcatttttatttcagtctgtcagggttgtgaatgtgatgttttaaggtacactgtagtgttttcacatcctcagatgaactgaattgggacaatactttgtaggaagttttttaatatagtatgtagacacattggtaaaaatcagtatgtccactggcttattagtttcacagatgcttccataattcttagtgtactcttgggtattttaaattatcatttcctgacagcaatcctgaaacatgccagtcttttaaagccttatttctgagaactaaagcaaggcatcagcgaaccatatctgacatgccatgttaatttccataactatcatttctgggaggtggtaggatttctaaggcatggagaatctcagtaaatctactttaaaaaaaaaaaaagcaaaatatctgttttattactgggtttccattcacgagccctgactgcttcattcccacttaaataatttcaaaaatagtgataagcatattttttctcttatagattattaaatatttactcacgtgcacaatatatcaaaacatattttgaattctatattcttagtgttgggtgttcatgttgtgaatgaaaacctcattctgttatctcatagcatatttatatatacaaataatttttgccttaagtaggaaagaaacagctaaaagatacataggttattttgctttttaaaattttagcaaactattctgtgaatcttttgtgtgtttggggctgtttgtagaggaaaatttcatcaagcaacattttgggaacattggccttttgtactctttcctaaataaacagaaacttgtactccccaaaataaaatgtttctttgtatattgttacctgcaagttattgataatggaaggaacaccttttcaatccttagtcccctttcccccaacacagcttttagattgtcgataaacttcccagctcagtaattaactgagctcagtcattgcaccctgtatcatgtgatttttttttccagtggaatacattattagagcacttacacagccagtctagctgcagcagcccaggcggcaacagcagtgccatttttcacaaagaaaatgttgaacaggagccaaatgtttggtggcagtctgttgctaggaaatcaaggtcctgaggcgattaatgacaaagcaagcaataacaagaaggcagaattacagatttaaaagagaaaaaagtggttggtgttataattacccaaagaaatccgcactcattaaattggctgtttttatgattgactttaattggaggttagctcagatatttagctcctttcccacccctttaaacacacacaggcacataatctgtagaactgcagacttgtttttctaagcattgagaggagcttgccctgtaatttgatccccactgacagatgcattttctatgctgccattttgaattaacctattgtagaacaattttcttcagccctgttgaataaaacatccagtctgattacctccgatggatttgatagagtaaaagaatgtacttctcattgaagtagattgtttgcatggactctactgattgtgaactctgccagtaagcacaatcatttgtaataaattttcaaagaaatttgtgaggaaaaggtaatgagagtcacccttttatagtttaatgtttggcacctccatcaaaataatataattcttataagacagtgttatttttccagtaagcttttcacgtggttttagaaaaaatttctgaatcttcatttggactattcatatatttaggaatagagtcttgtatttacactctaaaatgaccattcttcctccccaacaacagtattttagtgcaagactcaatatgcaaagcactctattgcaaaaatatttttggtatgtacaatatttaaagtgattttaagattggcctatttcagtctttgaagtatttcccccccccaaaaatcccttatttaaattttttagggtgtgataaagcatattactagaaaagcatcaatcggtctttcaggtacaataccagaggaaccatcacagtttatttacctttcagaagctttaaaaataaagttacatgatgcctctgctctccagatttctaatcaaaccctggaacaaaagagccaagcacattctatctgacaatgcacacactgctaatcagatgccaatgccaagctgtctgctttgttaaatacttagcttcctagaggcaggaagacagctgctataagtatgatgaaattttgtagttcaatctatttttgctacccttgggctaccaagatactgttaatttagaccaccccaattggtacattttagggagttttttaaagagtttgtaattaaaatgataaaacatcgttattacattgaagaccttctgtaagttttacatttggcagatacctactgagataaccccagcatgtaatttacaatgatgtaatggttgtaattgcattttagaaaaaaagaactataggaggcaagtgcttccattagaagagtttttaaatctgcttctgtttcatttaaatctacttctatccccaaattacttacttataattgactagagcagctataaaccttaagatgctatctgaatatttttaaaaagttatcaccccagacactgccaccagggggaggaagctaaaatcttaaagttcttaactgatgatgatactgccagtaggtagattatattgcttagccctacatagttaactacttcctccagataataccgccttttgggacatgattctcacaacctgtaatatgtgatacctgtagacttagcacactattaattgtaaataaaatggaaactttcgtactctggtggttggggtcaggaaggggaaagaggaagtacaaataagcaacctggacatttttattgtttttctcttatctgttagtctacttgaagagctatccttgaaagtgagtgctttagatctatgaaactgggcagctatcatagcacatctattaagatctaataatcacataattaatgtagcaaaatgaatagactgtaaggtagttttctattttttgttactacactgtggttttgtttttaataaatagttttggctttattttaaacaattaaaaattcaaaatatttttatgaccaaagcttgtaggttctatccctggaaaatattttataaatgcagaaaatagttgcttaggattggaatccaactctgtttaccatgaacaacttaaaagttgatctcataatcttgcatgttgtggaataataccacgaaaaagttaattaaagaatttagatgtttgttctcctgtctagaactcaataacttttaagtagtaactctccctacagtttaactgttaaacagtaactcttctgacagttttaggttttattctgtgaagactcatgatttttaatttttgcatcttaatttttcagttatttcaggtattgaaattacaaacgacgggaaagaaaagtggttgactaaaaaggggatacaaaaggcaatttttagggcgatgtactgttctgtatggtactgtggtggtggatacatgatactatgcatttgttaaagcccaaagaactgtacatcacaaagggttaattttaatgtatgcaggttttttaaatgttagggatttcaggatagaatgcaagctgtaacaaatgaatctaattgtattacaaatgtatggcataacttcactgaatgggtgggggaaaaggagctgacctaagtaactttggaaaatggtgttttgattggacaatgtaaagctaaagactaaggaacactatagaaacactctattctagttggtaaatttgtttctcataacggtatgggtgaacagttctgaacctctttacatgtatcctggggttgaacaaataagtaaatggatgatgaatggtggaagctaggtttctcactgtcaggaagggatgttacagataaataaacaagaggggagagccagaatgaaacctgtggtactggattagagttggagatataagtatttactcatgtttagcttaatatatgcagatggatagatgcagaaataattatagatgcatgtgtatatgtggattagtatacatgcatatgtttcctagctgtgtttactgagaaggcctagaagcagtgatatcccagtagccacaaacacatctaacgctcacatcctggtttgtaaatcctattctccaataaaaggatccaggactccttttaaatatgactgattctggggctggtgatgggaaaatacaacataagcatggaatatcttgtagtgccagaaggcaagagatttcttaaaaataataaagattaagcatgccaaaagggacacatgagccaatgtgaaagaactccgagtggccgtagctggaataattagagcaacaaaataaaacatgtagcattggattaaggataaattattgagtaaatatacatgagttcacagtgttatgtataaattgtataaataagtaaatggaggagaagagataaatctccctgacagaagaattccaaataacatattgccccctccagaagggggatcctacttcccttctccttgagagtatgagctggattgagtgagtcatatccaaaaattgagtttggaagacagcgaaatactgacttgactatttccattggagaaagctggtaaacaactatgttaactaagtgatcaaggttaacatcacaaatgggaagtcatgctgatgtgaagaggtggaaacttcatctctctgatattctttccctaaacctgtagcctcaatctaatcattaggaaaacatcagacaaatcccaactgatggacattctaccacataagttgagcattcctgaaaactgtcaaggttgtgaacaatgaagaaagactatgaacatctcactgacaagaagagactacagagtcatgacaactaaatgttacatagtttcctggatcaggtccagaatagaaataggatattagtgtaaaaactggtgaaatctaaataaagtcttgactttagtcaataatccaccaacattggtttcttggtttggccaaatgtaccacagtaatgtaagatgctaagatagtgacattagaacaaattggatgaggggtacataggaagtctgtatattaaacttgcaatttttctgtatatctaagttcccaaatataaaataaatttatttgaggttgatcaatgggctgactatattgacaagatactgataggttacatgttgaagaaaacatacaatataaaatagagaaaaagtcagttccatcccttcccactccccctttacctacctgctccccagtactcatcattgtgatttagtcagaacagggtttagtgccagaggtcagggtgactgagggtggaggagttgtgagcaatgggttcatggctgtcacaataatgctgtggcaattctatggtttcccagctgggagttaggagtggggagggggctgcagcctgatgacagccagctgaaggaagagctacctctcccttccctagctgctcatcacctgaacccaagaccacgccaaacaagatatggatgtagatgctcttgctgagtctgttccgcaagagggaaagaaagggtagctgctccaaacacgccgtcctcatatacaagggtgaggggaacagaagcatgtggctgctaccagcaaaggaaaagtaggagagcaatagaaaggggaggaaatgggaagagcagaaaatcaatattatttaaaaagtgacctaagacttaaaattgaattagtatttgtacagaaagatgcaggtggaataactcactctggcctgtgatcaaaattatatggagaaatcatggtgggccccttcctctgtccccagtggtggcaccagttgctgagtgtgattagttagaatggattccagtctagtcgttcaggcagaggaagtagttgcagtgggcaggcaagaggggctcagttgctgcagcactggctcttgctggctgggtggttcttctggaggtccgtacctcagttttggcctggagcaccaggtgcactctggggcttattaggaatcttcttagctctcgccgtgtaaacttcattcacgttcattgcagtctttactgatgtctccatagtcaactgtcgtcgtctgcatagtcctgtgcttcgtggaattctggggctttcttgctggccaggtctgccttgttacccacaagtacagtgacaatgttggggctggcctgcctctctagctccttcacccatttcttggctggtgcaaatgtatcttttttggtgatttcatagtacatgggggctgggctatgataccgctcctgtccagcgctgccccagatctcaaacttgactattgtgtcgtctaagcagacagtctgtgtaaggaaggctgctctgattatgctctcctggtactcttgaaattgtcccttgacaaagtggaggacaaggctggatttggccaccatagactcattgttcccagtggctggtccaccaggtcgtgtgctgtgccttgccgacccgccactacccgtccagctgttgtgataccagagagcatggggacgggagccattgctatgcaaagaggcacttagttgggaagggggtctccaaaatgacgcaagggcagtagtattacttggggctggggctcacacaggctccgcttctctccccccacccctggtggtatctccatataaaaattttacttaaacgcagagaccatatatgtacttaaacacttgtctaaagaaataaaatatggccgggcatggtggctcatgcctgtaatcccagcacagaggccgaggcaggaggatcacctgaggtcaggagttcatgaccagcctgaccaacatggagaaaccctgcctctactaaaaatacaaaattagccgggcatggcagcacatgcctgtaatcccagctactcaggaggctgaggcaggagaattgcttgaacctgggaggtggaggttgcggtgagccaagatccccgccactgcactccagcctgggcaacaagagcaaaactccgtctcaaaaaaaaaaaaaaaaaaaaaaaaaaaaaaaaattcccctgcctctctccaccccagagggtaaccattatcctaaattttattattattattcacatgcttttctttataggatagccatacatgtatcactaactgttctaccatatctcataacctcttatatagtttcccttttttgtcatatttgctgtgttctggataatttcttcagatctatcttccgatattggtaattgtatcttcagcagtgtctcatattctgttttacctgacattgaattttatgtaataatcattacttccattttcatttcttcccctgaaatcagtttactttatcattttgataaactcatttcattctcatatatacaatcctcttgtttatttaaatatattaaacttattttctattttgtgcctagcctaatatttaaagcttatgcagttctgattttgctgtctgttgtttctgctggctgttactcaaactgccttattttcctgtgtgttagcttgtattcattatttgtggtgatttctgagactgagatgaagatacgtttccaaagagagtatttacatttgaatctgccaaaagcctggggatactgtcaacctgggaacacattcaaataaatgttgggcttaaagttttgtgggctgcataggtaacatgagttccagatccataaaccttcatgagggtgggcttgtggttaaattttcagggaagatgtatttacctgcacccagcatcaagtttgaaagaggttaatttccttgtttattccttctgtagggtagacatcattctattcaactcttacactaaacatgtatgtagctctttaggatcccaactttatgtggagagtctaattagacttcgtatcgttaatgtaccctagaatttatcccctaaaccttgggttcagtagtgtcctggtaaatattttaaagctggctgtccagggcaaaaaaaaaaaaatcctaatttctcacatttttctatttcacactatggctgatttcacgataccagcctgaagtcattgaacgtggagttgggaaaagatatgtacagttagctttctcaactccagtgtatcactgccagttctgtacatggctgtgaaaactgaagctcaatgcacagggcttggcatatccctcagaatgaaagaatctgagtgtttgcctacccctctggatttccatttttactttgttttaaccttttgagtattctgtgtcaactcagcaatatacttcaaaaaaagattcttttgttttctttttattttaacccagcatttgttgttgtttttagcaaaagtcctgtgttagggtacctatttagtcagaaatagaagtctctgtgcttgtttgtaagtataatgtattatttttctttttggggaaatatagaaagaaatagaagtctctgttcttgtttgtaaatttaatgtatttttcttttttgagaaatagagaaaagtacagagaatattaaaacacccataatcctatcatatatgttcattttatgtgcatgtatgtctctatacatttttatataatttgcattatatctactatttcagtatatgatttttgttaatatataatgaatgtttgctcatgccgttaactattcctttaaaacagcccccattatatatgagactaaacataaaatgctgcacacataggagttagtataattcagaaatttagtctgtattgcatttggaaataattttgtgaaggttattcatgcagcattattaataattgcaaaatattggaaaccatataaatgaccagttctagaagattggttgaatatactctggaacatacaatagactactatgtttataaaagctatctgtttttataaatatatggagtaatttccaggaaatattacatgaaacaaaaagcagaaacaaatacccatagtgctacttgtcatacaagaaaaagggagaattaaagaatgtgtatgttcaggaaggataaagcagaaaacagtaaaattagttacaagaggtagaagggagagtgaggtggaagggatgtgggagggagtgagacttggatattggggtatactttcttggcatagtttcaacttttgaaagcatgttaatgtccaacatattcaaacagttaaataaaaatgatatcactgggacagggacctaaaattgtaaacaaacaagtgaacttaattcatttttttttcttatttttttattattatactttaagttctgggatacatgtgcagaatgtacaggtttgttacataggtatacatgtgccatggtggtttgctgcacccatcaactatcacctacattaggtatttcacctaatgctatccctcccctaaccccccaagcctcaacaggcccctgtgtgttatgttcccttccgtgtgtccatgtgttctcattgataaagttaattttaaagtaaaatgaatactatatccataccgaaaggggataaagaagaaagaaatgaaggaagaagggaggacagatttatgaacaccagattcaactatatgtccttagcttggggtgggtgggagagaaatgaagaattgcaaacaaatcctgaactcacttttgtaggtttattttattttattttatttttttgaggtggagtctggctctgtcgcccaggttggagtgcagtggcgtgatctccgctcactgcaagctcgacctcctgggttcacgccattctcctgcctcagcttcccgagtagctgggactataggtgcccaccaccacgcctggctaattttttgtatttttagtagagacggggtttcaccgtgttagccaggatggtctcgatctcttgaccttgtgatccacctgccttggcttcccaaagtgctgggattacaggtgtgagccaccgtgcccggcctataggtttattttaatggtatgggcaaactaaatcagagactattttgagcaaatgagtgagcctggtttctcactatggaagaagggacaaacatatagacaggaggaagacaggtaagaattctgtgtagaggaattggattggaggtgtctgtgtacatatggacatttctgtgtgtgtatgtatctgttgatgtgtgtgcatgtatttttgtatatgtatatgtatgtgtgtgtgtgtgtgtgtgtgtgtgtgtgaagagacattcatatatttcttagctctattgctgaaagagcaaaggagcgaagtcacaatagtagtgacacacctagcgttatttcccactgttagtttcctaaggctgctgtaataaattaccgtaaacttaacagaaatttattctttcatagttcaggcggccagagctccaaaccgaaggtgtttgtggggttggttccttcttggggaggcagagggagaacctatccatacctctctcctagcttctggtggttgtgcataatccttggagcttgatggtttgtgacattataacttcaattcctgccttcattgtcatatgacattcaccctatgtttacctgtccaaattttactctttttatcagagtaatccactcattagggccgactctaattcactgtgactttatcttaacttccaaagaccccgtttctaaataagctcacattcacagggttagtacctgattatgactttttgaggagcacagttcagtccctaatgcctactaaaactaaagctcttcactcaaatgactggcttcagtctggggcagggtaggtacaagatgaacctagaacatgttgtaatgccaaaaagtaaggaaatgctaaaaagtaagataagttgtttgttaagtatacagaatctagcttgaagagttccccactggtcaaatctagggcaatttgagcatcaaataattaaatacagtaatgaattataagctgttggaaataaagaactttataagaccattccaatcactaatgggtggatggatagaaaatgaagatattttacttacagtggcatgctgaaagttgaccagcaaatgtggaggttgtgctagagttgggaaaaaacaaaacaaggaaacctcattttgcagtcatcatgttaaagattagatcaggcaaaaatcatcaatggttgtaacatctaagaggacagacatgttgatgaagaacagaatatttacatggtcttgaaatgttgtatgggagaagagaaaaacagcaacaatgcagtggagaaatcagacaacacattgacagggtgatcacaagtatcacctccagtgagagtcaaatgaacattgtttgcctccttatgtgtttatctgtccctgagaagtacacaacatcatctatgcagtttctggcccagaatgcatctcaactcaatcacaagagaatattatgcatacatacagaaaaagaaagaatacaactgaacatagatgataaagaaaatgaggtaaaaatgtgacaacagatgaaaatggataaaggtattttctgtgtttttatttttggaactttttgtacattgaaatgattgccaatggaaaagtttagataaattgtcctaaagttacagagaacttgcagggaaaaacatcttaaagtagactaatagtggagagtcataaaagacacttggcaaatcttcttagttgaatattattcaaactattcagtcagggaactgattttgtgctaattatgaaatgcattattgcattgactttatgtctcttacaacattaaattatgttacctaggatcaatttgagattcaacacatgatagtagtttaatacagtgaagtcataacttgcaacaaactatcccaattttaagaattaattctgagcaatttttatatgcatgaaaaagatggttagaattatttgcagacacttgcatattctttagtcaagtggtcttattaccataattcatatctgttgtgggagtagggaagaaagagatttaaaaaatatctatcagttctttcaatcaagttaggtataatattaatagactttgagctaagaaagttttcatgaccagaagaggagcaggaactgtctaacatagaaaatgtttatggtataccataatcagttatacaaatataaaaggaaaaaatgtttgactagtgatactctcaaacttggatatccagaagagtgattctgtcagtacactaaaagcaaattcatctatcaggagctttcatgttttcattcaacaaatatttatccagtgcctattatgtaccagatagtgttatactgtgaatcgggagcatatgttaaaatagacaatatagtagacattattctctaaaattattaacaatagtagctaatactcatatgatacttactctgggccacataccattctaagatctttacatatagtaattcctttacctcaaacaaccttattagattggtactattattacctctattttattgatgaagaaacagaggcacggaggtgttaactttctccaggtttcacagctaaaagtagcagacccaggattttgaatccatcagactggcttgtgtccaagctttttttaattaattttttttattttgacataatttgtagattcacatgcagttgtaatataatacagagagatctcatgtactttttactcagtttctcgaggtaacttcttacaaaactatagaaccatatcataaccatcatattgacactgatatagtcaaggctccaaatatatctgtcaccacaatgatccttcatgttgcccacccacttccctctgttcacctattgaaagacatcttggttgtttccagtttggagctattacagataaagctgctgtgaatatttgcacataagtttttgtatgaacaccaatttttggctgggcgtaatggctcacacctgtaatcccagcattttaggaggccgagatgagagaattgcttgaggccagaagttcatgaccagcctggtcaacgtagcaagaccccatctcattttataaaaataaaaaattattttttaaaaggaacatcaattttcattactttagactgcctctaagcttttaattcttacattctaccacctctcaatatatagtagggaataaatagtagagaatgacttgatggttaagttgacattcagaagaggcctgaaggaagtgaagaaaaaagccatacagctgtttggggaaagcacatttcaagcagagggaacaagcacagaggccttgagaaggaaatatgcctagagtgtttgagacagagcaaggcggctggaaggagatgagttctacaaggcagctatgagccaggtctataagatgtggctgctatatagaaaatagatggtggttgggcaagtgttgaagcatggggaactattaagaggctgcccatcggagcttgcagtgagccgagatcccgccactgcactccagcctgggcgacagagcgagactccgtctcaaaaaaaaaaaaaaaaaaaaaaaaagaggctgcccatgtgagagatgatggtagcttagacttatggtggaagtgttaaagatggttcagattctagatatgttttgaagaagagctcacaaaaatttttctgatgggctgacagttggatatgagaaaaggaaaggaggcaagaatgattccatttaccaggttccaagagaatgattacagaaaccaatagattgccttatttatttatagtaggaaatgtagttatcacatcggcccaaatgtttgtgtctgcttaatccgcatatctgtttctttaggcaaacttgcattggaatgtaatggcgactgcagaatcaggataaggggacttgaataaatcagtctttaaatgcatctgaggccgggcatggtggctcatgcctgtaatcccaacactttgggaggccgaggtgggcagatcacttgaggtcaggagtttgagaccagcatgcccaacatggtgaaatcttatctccactaaaactacgaaaattagccaggtgtggtagctggcacctgtaatctcagttgctcgggaggctgaggcacgataattgcttgaacctgggaggcggaggttgcagtgagcctagattgtgccactgtgctccagcctgggcaacagagcaagactctgtctccaatcaatcaatcaatcaatcagtaagatacatttcactccagcctggacaacagagcaagactctatctcagtcaatcaataagatacatttatctctttagtagggacctgaaaaaattaaattccatagacaaaaggctttctgagctcttctttaataagtagtgttggcagatgcagtggctcatgcttataattccagcactttaggaggccaaggcgggaggatccctgaggccaagaatttaagacgagcctggtcaacataacaagtccctgtctctaccaaaataataataataatatttagacatggtggcttgtgcctgaggtcccagctactcgagacgctgaggtgggaggatcccttgagcccaggaggtcaagcctgcagtgatccatggttgcaccactgcactccagcctgagcaacagaatttttatttttatttaaaataaaagtagcacaaacatttgcttttgtttctctttcataatgcaccaacactaccctaacccccaacataatccttttgtagatttgttaatatattcagacaggccatattccatatctgatcctacttagtggtttgatggttggctaaaaggcagtattaatatctgttatttccatgctattgagggatatctcacattgatcatccttgtattggcaatagaaataaatggtgatagtatttttttcatttagataaatttagcactgctcttagtattattgaaacttagtttaggaatgtatcatttatctataatcatttattgctgaagtgaacccttctttaaattttcctcttccaaatattgatgtagttctttctttcttcatcagttccatgcatacaattcaattttcttcatgacacgggatcatcatctataacgtctgttacttataggactattctatgagtctcttcaagtgtatacatgtatttgcttttattttaagttactcaaattgttatatattttgagtacttatatatacattttaataattttactagccctggagctggtggtgtgtcatcttcaacttcctttttaaattccttctaatttcttagggtgggaaaaatctaattcagtagattgaatttttagaaaagagtagataaactgatgtctaaatatttaggtatttgtctattctggaacctttttgcttcatgatttttcttttttactttgcattcctgagatttcctttcatgaactggaaggctttactttactaagtgactcagcagtagctctatgtatcttttagttggaaatgcctttggctctatgcatgcacacactgcccattaattagcaaaccaacatagaatcatctgttgatgacaaaattaccaaaatggatcatccataagtgtttatactgcaaacagtgtatcagaaatgtcataatctcattcattaagaaatttacatacacaccagattttagagtgctcattcatgatgaatgtctacttccacactgtttgtttggaaacattcaatagccagtcttgaatttaaaaaatttaattgaatgcttaaagaattacaagtgttcctttccttggctctaatgctaaccaaagtgcttttctaaactgctaagaatggactgaagattctgctgagggctgtagatacttatctgcctaattgagccatcatttgttgacatgaagaaaaccacgtgacctactttaatgcatttctcagtagcagcaggaggctagaatgtagttcatccaacagtaaaactagcagcagtattattagacatgtgaaaatagcattggttatgggattagttttgtaaagtaaggatagtaatataaaggtatatagtcataatataaacagtatagagtgatttttttattttcaaaattatttgaatccaataatcatttaagtcagtcattcagtaactatttaccaatgtttacagttgccagctatattaaaggaattgttgacttgtcaaagttgattcatatgagagtaacagtgttaaaatctgaaactggtatggattgctaaaacgaaatactttgagtacacagggaattactatgatcaaaactatgctggatacattaatttgaccatgtgtctttaaattggaggtgaggaagattagttacagatacattaattagaaaggtgttatattagtctaggttgaggctgatataagtaagaaagtaggaaaggatgcaaaagcccttggaaatgaatatttgtgtgtggtgaagtaaaatgaggtagaggttacccttttacatgacttgagagaatcatggctcatttagtaaatccagagggagaaatgattttctatatatataatgagtttggaatacaggaagaatgccaaaaataacatcttaaggaattcttcctaaatagtgaagaaagaaattagtatcaacagaagagacagaaaaggatggttatgaaagataggaggtcatcgctgtctaaaatgactgatggattttgattacaccactggtgatagaaaaaaaattattagagaaaagtgtagtctgagaactatttgatcttagtctgtaatgaatgaaatataaaatttgagactatttggaaactgtttaacaagtttacacccccttccagcaaatacaaaattacaacaaatttaaagatgttaattggtttttatttgcaattctaaaatcggacaacaacctcattctattaaatagaatgaatattccagtaagctgagcagaggaagttgactttatagacagaaaagggctgaggaaagcaaaaacagaaaacaaaatgtggattggtatttccaaaattacttttcttataaaggttaaagcagaggggacttccttataccagctaaaactggtctgtttggggatctggctattatctgtttctcctgatttcttggaaagtaagataaacaactatgttttagcttagtgatgtggaacttcagcttgagtgactccattttggtttggtctggtgggcctagtgcaggagcttagtccaaactaatgggatcctatacattttgtttaacactgccaacatcctggtgcacgatcatcagatttctcattgaacagggaatggatgactttgaatgttggagagcacctgtggtgagttgtttatatataatctgtaaactagttatgcacagtagcactatatatgggtctatgttggactagaggataaaaaataacttggccttcacctcagagagtttaagaatcactatgccaccagaaagatggtagtagtaggcacattacatcgagtgaagactgttgggtgagagggaaggtttgcttaaagatataagagatttgagtttgtatattgtctaaggaagatatgatagaacagaagactgataatgcagtgtggaagagtgataactgctagatggaattgagatcaaaggtttatagatgaagactttatccttggaaaaatacatttacatttatttaatgtttagtttttaaattagatattatgtaacttgagcctcacagtaatccaatgaattaggtgacatatggttggtataattcatccgcctttacatttaagaaaattgagacacaaaaaatgttgtgtgttatccacagtcatgtggttagtaaatggggagatattttcatgcccagttctatgctataactactattatgtctgaaaataaaggcagaaaaaaatacttgaagaaaaaatggcaaaaaaccgcccaaatttattgaaaaacatttgtttatacatctaggaagctctttgaacaccaagtacaataaatgcaaagagatgcacacctggcctcataatagcaaaatcttgactatttgacaaggacaaaaggaaaatcttaaactcagcaaatcacaacaggggaacacaaaattaacagcttacttctcaccggtaccaatgaagccagaaggtaatgagataacatatttaaagtgctgaaagaaaaaaatcatcagcaaataaccttatgtccagcaaaaatatgtcaaaaataaaatgaaatattttcctagataagcaagtctaagagtgttcattgctggaacatctgccttaccaagaaatactaaagaaaattctttaagctgaaattaaatgacaacagatagcaatttaaatctatacacaaaaaacaaagagcatcaataaaggtaattatgtaagtaattacaaaagacagtataatgacatatttcttcactattctctcaactcatttaaaagcaaatgcatacagcaatttgtgtataattgtatttaggccctatgacttattagaatgtaatgtatatgatgataacagcagaaaggaggtgcatggcaacaaagctctattggagtgagtaagaaaaggacaccagatggtaaactaaattcacaagatgaaatgaagaaaaccagaatggtaaataagaagattaatataataaactctttaaatgcttgtagtcctagctacttgggaggctgaggcaggagaatcgcttgaacctgggaggcggaggttgcagtgagccaagatcatgccactacgctccagcctggaaatcataaggaatagaaaatatatttactattcattaagtggaattgaatcatcataaaggtcttcatcctcttagtcttcatttactgtctccaaaaaaaaaaaaaagtttccatgactcttcagtagattatcataaattaagatgtatattgtaacccttagggcaactgatgagaaaataacaaaaaattctagttaaaaattattaaaatgcccctataatatgcttaactgatttttgacaaaggtataaagccaactaattggtgaaaagatagccttttcaaaatgttgctgtggcaacatgacgtcaaaagtgaaaagtggccaaaagaccaaaaagtgaaccttgacctgatacaaaaatcgagtaaatggatcacagccttaaatgtaaaacgatgaaacttttatgaaaaacataggagacaatctcagaatctaggggtaatcaaatttctactgaaaattttagtagccacagcaaataagcaataaatagaaagaaatgtcattaaggttggaaagaagtgaaactactcttatttgtagatgacattttgcatatagaaaatcttaaggaatccactaagaaaaataaaggaggacaggtagtgataaatgcaaaaacagaaagtaatgaaatagaaaacaagaaaatagaattaaatctaaagcctttttaaataaaattaacaaaataatcaaagtggtcataacactaagcaagtgaaaaaagaaaagatagaagcaatattataagtgaaaaacaatgtttaatcataaacaattctaagaaatttggaccaataaaagtttgacaaaaatctgaagttctctaatttgtttatatatttttggtatttatgtatttattgtcataggtttcttagttagattcatggccaaaagtaccatccaaaaaactatttccaaatgtatatttttagcacatacctcttttctgatctccaaacttaatgaccaactggttatttagattattatatgcaaatagacttcttaatatacagtgtcaatcctgtttctcttatgtttaatacatctctgtatatggtaccactgcagggtttgactcatgtgccctagccaaaccctaggagtcatccttgattttttcttttccttcaataagtccctatctttatatctggaacccatttactcttcttttatcagcaattaccattctattacagaccattagtatttttctcctgccctactgctatagtctcctgactgatctccttctactttttaaccctttcaaaccattctccacagaatagctggagtggccttttaaaaatgcaaaccagcataaaacattttgatgtttaaatccctctcatggctgccaatgattgctcatagaataaactccaaactttctgccatggtgtataaagccctacatgtcttacatggctttcctcctacctgtctaatatcatcttattctagttctttctcattgattattcctttaacaaccaagcccttttccttcaaaagtccttcactcttactcctccttcctggaatgctcttcactgttttctaagggctgactcatgtataaccttcaacattcaactcaaatgccatcctcttagagagtcattttctggttagctatctaaagtagctttccctgttcctccatgagctgttgtcataatatccctccaacccccaacccccaccttatataaccatgcttgtctcctttgttgcagttatctccatttgtaattaacttgtttaaatcctcctagaatgccagctaataagaaggtaaggtccttgcctctctctctctttttttttttttgagacagtctcccctgtcacccaggctggagtgcaatgacgccatctcggctcactgcaacctccacctcccgagttcaagcaattctcctgcctcagcctcccaagtagctgggattacaggtgcctgtcaccacatccggctaattttttttttttttatctttagtagagatggggttttaccgtgttagccagagtggtctcgaactcctgacctcgtgatccctccgcctcagcctcccaaagtactgggattacaggcatgagccactgcccccggccttgcctctcttaataaccatattacctctggcaaccagcatagtgcctggtatttattgtgctcagtatgcatctgttgaatattattattttgtatactctatagtgatgagcatgttgtaagcaacccgatatgtataaattcattgatggtgttctctctctaaattttctttattgttttcatggtgggttcatttcctcctttaccccctctttttaggttgtataatcattagttttattttcatctctgattttatatggacatgtttcaatgcatacagacagttaatattcttttcctcctaattatctattatatatatcatcttcagtatcatcaccattcaaaaaactcttttatatgttctagataatgtggcctattttttacgttagactacctgataaggtgtcaactgaattggctgcctttatctacattctgaaccaaaatttaattctagagtttgtagtcagcgtttttccaaatgtgtaaaactgtaatccttcataaaatgtcatatgtaaaagagtaagcaattctgtgtgtactaaaaggtgagaaagttattactttagctttcactgggaagacttaaagtttatcaaaaaggattatagaaagaacagatttatagcaactgtctgatatatgaccagaacccttatgttccactgaaagagacttgccctaggctttctagagcataatgcccttagcaagtagctttcaacatctttttcaggaagcaatattttccttcagtaaaagggtcactgtactgtttttctttttccttccctgtcttatcttttgagttcaggaagtactttaaatttacaggcagctttgaagacatgaagcaagttcagccccagaagtatttcctgttatggcattaatctaattccatgaaagtagaactgatttttcatctgtaaagtagataaagtgcctagagcagccgaccattattctgggttatcatgataaagaggcttagttttgacacaaaagagtttatcagcctacccagtggaagatttcatcctttttgttgaaagatatattaatggattataatctgtcttggcttccaaaagaaagttcacctttatattgaaaatgattagttaaatcagcaaatattttcctgaatatacattttataatatacgataaatcaagcaaacattctagggatatcacatataattaaatatctaatgttaaatcattttatgttattttaatgtttaaattattgtctcaatttgaaataatcacagattttccttataaaccaacttggtttaattttaacatatagactaacataatttctagtaggcatatatgcttcattttagaagcccctgttattaggttatataatttctccttacaacttataatgtagaaatagttttcttataataaggtatttctcttaatagttaataattaaacttagttgattattttaagtatatagtacatacaaataatatataattcaaaagctataatatatttttcctatccctatttcctggttcctctctaagctaaggcatttagactaatcctagtggcttagtattgtttaaataattttttatttgaaaattgattccatattggacatatttacaatatttccttgaataataatagcttaccacatagtaatacattacatatttagttctctcagtagccttctgagttaaattctgttatccatttgaaaaatgcaggaactcaaggttagagaggttaaataattggctaaaattcacctggctgataagtgacagatttgggctggaactcaggtcctctaataccagagcctatattcatagcccatactgtaggattatagaaataaggttattcccagttgtgccttttatacttgaaaagaacaaaagattccactgaatgcttattttacaattaataaattaagttaggctttatcataccctaatgagatatcttattatttgtttaaaataaatgatctaccattatgttcataaataaaaataaagatattgttttattatagatgttaatgttttaaaacttagatcatctaaacatgaaaaatctctggcctagtcaaaggcacactgagaactaaacttgggattggaaaatttggagttttcaaatggccctaccaattcagcgcataattgtatatgcttatcatttttccaaagagggttgaatagtattcttccattgtatatcttagggaggcattataaaggtaatatgacatcagatgttaaacttacttatttaaccagcattcattgaggctgcctactatacgtatcctgtgaagcaatgtgaccaatacaaagatgaagaaaacatgggtgctgtctttagtgaactacccatcttctaggaagaataagatctattgtaatataaacaagagtgatgagtccttagtatatgtgaaggtctcctcagctaagttccaaaaagtaacaagctaactgtaatttcaccaccttagtattttatgaacaccaccttagtttttatgaactcaggaccttacctccactttatgaaaacacatatacacaaagcaaggagttttaataagcacttgaaaagatgctaatcttagccatcagacagtggcataaccatgtgagctttatcttaacacccactaggatgtctataatcaagaagacataataccaagtgttgacaaggatgtggagaacttggaaccctcatgcaccactggtggaaatattggcagttcctcaaaaggctaaacacagagttaccatatgacccagcaattccacttttagatatataccaaagaaaaatgaaaacctgtgtttacacaaaaatgtgtatatgaatgtttatggcagcattaattataatagtcaaaaggtagaaatgactgaaatgttcatcaactgctgaatggataaataaaattagattgttattttacatgagacacaaaaatgaactcaaaacagattaaagatttaaacataaaacctgagaccttaaaactcagaagaaaacatattagaaaagctccgtgacactggtcttgcaatgactttttatgtatgacactaaaagcacaggcagcaaaagcaaaattaaacaaaattgtatctatatcaaaccaaaaagtttctgcacagcaaaggagacaacaaaagaaaaggcaactcacagaatgggagaaaatatttgtaaaccccatatatgataaaaggttaattatccaaaatatgtaaggaactcatacaactcaatagcagaaaacccgattaaaaaatgagcccaggacctgaatagacattttccatagaagacatacaaatgacccaggtatatgaaaacatgtgcagtgtccctaatcatcaaagaaatacaaatcaaaagaccacagtgaagctgggttcagtggtggtggtgcgtacctatagtgccagctacttaggagactgagataggaggatcagttgagcccaggggttcaaggccagcctaggcaacataggaagaccctatctctttaaaaaaagaaaaaaaaaattactcccccacccccactttcctctccctcacaatgagatactaccttaaatttgtgactgttatcaaaaagtcaaaatcatgtggaaaaaagggatcccttgttagcgggaatgtaaattggcacagagattatgaaaaacaatacgaaagttcctttaaaaacagaactactatataatccaacaatctcatttttggatataaatctaaaggagatcggccgggcatggtggctcatgcccgtaatcccagcactgtggaaggccgaagtgggcggatcacttgaggacaggagttggagactggcctggccaacatgatgaaaccccatctgtactaaaaatataaaaattagctgggcgtggtagcacatgcctgtaatcccagctacttgggaagctgcggcaggagaatcgctcaaacccaggaggtggaggttgcagcgagctgagaacatgccactgcactccagcctgggcgacagagtgagactctatctctaaagaaataaataaataattaaataaacggaaatgaaatcagtatgttgaagagatatttgtactcccgtgttcagctgcattattcacaatagtcaaaatagggaaataccctaggagtctgtcaacagatgaatggataaagaaagtatatgtatatataaacagtggagtactgttcaaccttaaaaaagaaggaaatcctgccatttgcaacaacataggtgaacctgcaggacattatgctaagtgaaataggccagacacaaaaatatagatactgtgtgatctcatttatatatgaaatcttaaaaagtcaacctcatagaaacagggtagaaagtgtggttgggggagggaagaagggtagtggaatgatggggagattttggtcgtggggtgtaaacttttagttataggatgaatacgttctggagacctaatgtaaaacatggtaactatagtttataattatgtattgtatacttgaaatttgttaagaaagtagctcttaagtcttctaccacacacaaaaaaagataaatttgtaagttcatggatatgttaattggcttgatagtggtgtcatttcacaacatacacatatatcaaaacatcatattttatactgtgaataaatgtaatttttgtcagttataactcaagaaaattgaaagaaaaatgtattatatccacacagtgaaatattatttagtaataagcaggatgaagtactttcatccatgctgcaacatagataaacctttaaaacattgtgctaagtgaaagaagccatttataaaaggctgtctattgtatgatctcattcatgaaaagtcttaaataggtaaatcaataaagacagaaggtatattggtggttgtcttaggctgaaagtgttgtgggacaatgctacactcctaatagatacaggatttctttgggagttagacaactaatctaaaattgactgtggtgatggttacacatctccgtcaatatactaaaaatcacgaattgtatgctttaaatgcaatttatatgtgaattagatctcaataaagcttttattttaaaaaatagatggtattaacaaaacttttagactactgtgaccacttggcacacctaacaacaaagcatccaaggagattaatatttaaacgtacattataatatgaaaggcatgaatttagatgggggcatgtaacctcttgaagaaatatataatgtaaaagtgttattattgctattttatttcttattttaatcaaacactgtgatagtattattcattccactgtaacccctattggataaatacattatagtatttagaataaaactcatgtgttagtaagccagtgagaaagaatcataccagagctttatagatcaccagttctatctcctgtccctccatttcaggtatatgcaactggcctacctgttcagagtattaactctatggtgcttcatcagtcagaccatccactatgcccaaatgagtaatatgtccaaactgtatttgcaaaatgcatttcttcacagaaattaatatcctgtgcaaatgctggctaattgattattactctttcataaaggcttaattaggtaggaaacccagtacctgcagcgagagaggaagaaaagtctttcctagggctagatcctgacccaaggttttggattttaatggggcagagttgtctgttttctattaaacacatacttgggagtaagtagacttgcccatctcctgttttatactgatcttttcacgaatgtgaacctttttcttgaaagagtaaatatctttaaatttttctgtagccttccctgttacaagttaaatgttcctacttctctagagtatttcgaagtgtttatttaaataagtaaacatggatagacactattttgtagcaaggggttgggggagtatactctaaggcagcttctctctgacagcttatctttcttataagtatagtgtaaacatataatttataatgtgggaaaagagggtttgatcttttaataaagccatttctttttatttcagagttaaggagtttaaattctttttctttagcatctagcagtgagttcaggggtgatggtcattaatatcttgatccattacttttcctaaaagataagattttttttcccataatggttcatttgtctgactgctttatttcccaccagaaatcacaaaatccatttttcctgtgacagtataataattttcacaacatctgattttagtggcacatacatgcagaagattaaaggtgtaggttagaaaagaagcagtaagaaggcattgagaataaaaacatggtagaatttatttctttaatgtcataataactaatttagaaaaacaaatataaacaatgggttgtaaatagtttattcaatattttaataaagaattaattcattacatgcacacttatttttacatacttgcccagatttcttaccaaaaaaaattttctcgccctattctcaaacaaaatttatagacattatatacagcctctgttgaaaagaccttctgttaaaatcagctgcccttagcttgacatatcttgagttcttagtgattaacatgttaataacaagtgtgaatgtcattaatgttcctataattaatttcagtattaacaccttatgtttcttattattcattcctcaaatgaaggatttttccatttataactaagtggcaattattatatcatttttatataatggagcaataaattgtatctgatgttattaatagtaattcctacattccttataacatacttttatactcattcctttatatattcctttactgttatataatactttttaagtgcctttaagtgaagagaagtggttgaaatgtaaaagaagctacttggaatgtctgtaataacaaatgtgttagtatatttacacctgcttgaaggaaagagtaaagtatttcctgaaaaccccacaattatataggtagttcaacctctgatctgcactgaggcatttaacctctcttaaccttggcttccttatttaaaggaagtggctgttgagccttacctaaatcataaagtgagtgcaagtaattgtttactgagaaatctaagaaaggctaatggaaaacatcaagtatgaatgaaacagttataactgttttcccctttgaaaagaattgctgttccacattgaatttctgtcatgaatctaactctttttaaatgagctatttaaatttaaatacataaatggatgttatattttgattttaattacttcagtagtaattcagaattaattgaagctacagcttaaacatattttattacatttaaatagttgggaaaaaataaacagttggttagctaaaacccaataaataaattgggaatagattctgctagttgaatgctgaaatgaatagtatatactttaaagggctttaattttttctttcatactgatttaagactgataatttatctctttacttattctaattatttgaccctttttgttggaggagagggggcaatcttgtcactaattgtgtaacccttgtttaatttactctttcaggaacccttccaaccttccccctctccaccttaatacactgatgttcattttggatttccaagagggagatatgatatgcaactttaaaaaacctattttccagtcaagccatttttcaaagagagcttattaacctctcctatggatcaaattgtgaaatactaaactaggttgcctgtggaagtatagtgagagacgacgataggaaagaagataggatggggtcagaagaaccttacattccatgcttaggagtataaactgtatacgataagcagctgggaaccataaaatccttttaagaagtattgtgatataagactaatttgaaagaatagtgagaaggtggataattgtacatttgattttattcctttatgctaataattcccatgtacatacagtgaatgaaatataggagacaaacatcttcaactattctcatttcttattggttttagagcttggaaatatgttaaaaagacatgtaaactagttccatcaattgtatttcctcctatttagatagtacagtgattttgagcaaactgttaacattgattttaaaatccaaaatatattattagtctataaatcactgcatggttctcattcattgattttcacttaggaggctttggggggttgttttgtttttataatgctttacccaaagcattttaaatcttctactctccagtaatagtttttgtcaaatatattttgatatctgctgtactatttgctatatttacttaaacatctctccactacgtagagcaggtactataggaggaaaaacttttcctctaccctcttatgttcagtagttggtgcttgcaaattaaactgacaaaaaattaggaggataaaaggattattttgtatgcacgtgagaagcctcacagaaaagaattgaaaaccccaaaaaaccaatgagaccaaggggcttacatatcattttaagaaagagtgataaagtatggagaagagactagacaaaatgggggtttagacttctggtggggtgagggtgggcattaatgataggtgactaaggaatgagtggtaaataagggttgtttagtaaggtttattaggcagagtcaagtgagaagagtctgcttcttctcttcctggtactggagaggaggacgccattacaaatatgaatttcctttacaaaagggaaatttatgccctatttttaggaagtaaaggggagggcagagagctcctcctatgtttgctgttttaattgcctgtagttcaaaataatccttatgctgaagtggcatatttgagggtgtcatactctgatccccttcactatagactactctctaataccagggtactgagttaagataattctgaaggcttcgctaataatctactactctttgtcaatttcctatcttagttttctcatctgtaaaatggagatcatgatagcacttacctcaaaaaatgataagaagtcaattaaaaaagcaccaaaaaatgcttaataaagtggtctgacacatagtaaattctcaatgaataatgtatatactgttaaggagtcatttccctctaagagtacaaagtacaaaagaaaaagttggagcttaagatttaggtttggctgggtgtggtgtatcacgcctgtaatcccagcattttgggaggctgaggggggtggatcacctgaggtcaggagttcgagaccagtctggccaatgtggtgaaaccgcatctctactaaaaatacaaaaaatggcagacgtggtgatgcatgcctgtaatctcagctatttggaaggttgaggcaggagaattgcttgaaccctggaggcagaggctgcagtgagtcgagatcacgccactgcactccagcctaggcaacagagtgagactctgtctcaaaaaaataaataagagttaggtttaatcccagctacttgggagggtgaagtgggagggtctcttgagcccaggagttcaagtccagccggggcaacctagtgaacacttccctccactccatctcttaaaaaggatgggagtgttcccagtgctgattatgccacctattagccgtatgaccttggacaactgtaagcctcaactttcccatctatgcaataagaatcatttttacctcattagattgttatgaggattaaatgaagcagcatgtatatatgtgtatatatatacgcatatatacatatagtatcttgtatataataagtatttattacatgcaatttcatcttttatgtagactttctagactctaaccttgccccaggaagataagtgacttttacattaagccatgttctctttttcctttatgacactcctcaatgcttaatgaagaactctggctacacaaaaaactaaagtaaaatgttgacagactgcttttttctacatctgggcttctttaattgaaagctgacatttaggccaagaattgttaggaattcctatttaggtttataccagttctcgcttatatacaagatgtatacttgtgtatacatgttatttacacacatacaataatatatactggctttctttttttccctctcatcccataacagatagtatactgccttttttaaaaaaaaaaatgcccacttttcaaattaaaaagcagaggcacacattctttccaaatgtattagtataatttgaaataatgagattgtattaataggattcagccacagaaacagacccattagggaagatagagtgagaataagatttatttgttggttgatcgattttgaggaattggcctatgtcattgtggagactggctaagtagtccaaaaccatagggcaggcaaccaggaaggggagaaagccttgaacttcttaggcatgggcagaagctgtcattcataggtggaatttattctctctgtcaaggaaacttaagccatgcttttctttttaaattttattattattatactttaagttttagggtacatgtgcacaacgtgcaggcttttactttcaactgattgaatcaggcccctccagattatccaggatactccagtaatagaagtcaactgactgggagttttaattacatctgaaaaatacctgtatagcaacacctagattggaatttgattgaataactagagtctgtagcctagtcaagttgtcacctcaaaaaaaccatcttgggataaagttttttgaaaaaagaaatagaaagttcagggcattttggtcattatttttgtgtattgtgcctattatatctttttattttaaatttttgagaatctgtttagtgcctagtattttgccaagattataaaggaaacaaaggtatcttaatgtttttttcaaatcttaacatcttaaagttgtttcaagcattttccctgaattcattgattaagtattgttagaagaagtggaacatggatgatgcatatgctttagattgaggcaggagtatgtgtggtgactaagagagtaagaaatgatgatctcgagaatactagactgtgagctttctaaaagctggtatcgtgtgttatttatccttgtattgccatggcctggcacagtaattgaaaaagttcaacaatggtttgttgtttaggttgattaaggaatgagcaaaaacgtaacttaaaagctatctgtattgaagtgtgatctgttatatgtattcagatctgattatacttggagtcgaaatcactgtatctaaattaatattaagactcagggccaggcacattgtctcacatctgtaatcccagcacttcaggaggctgaggtgggaggtcagttgaggccaggagtttgagaccagcctgggcaacatagcgaaaaactctgtctccacaaaaaattaaaaaaataaaaattagccggacatggtggcatgtgcctgtagtcctagctacttgggaagctcaggtggaggatcacttgaatctagaggtggaagctgcagtgatctgtgatcgtatctctgcacttcagcctgtgtgacagagtgagactttttctcaaataaaagaatcaatacagcaatacagccccaatttctaaattggagaaagtcattttctatttcgtctctctctgttcctccactagattgtaaactctttgagagtaagaattatgcagttttgtctgctcttcaatgttttattgccttgcattaaaaagataataaatactgcttgatgaattaattaaaaacagcatacagaagagatccaaatttaattttgtaataaatcacctctgagaataataagaaaaccagaatatttgaaatacatcatttaattgaataaggaacagtaaactgatttttaatgttcctgtttttatgtatttgaagttaatgtttagttattttgttttaaaatctttataaaaattctctgctttatcttccagtgaacaagacatattaatagcttttctgtagagcaaggcatattaatagcttttctgttgaatatgaaagaaagcagctgtagttttatcctactgagtacaaatatttgttggggaattaaagatttattagataaatggcttaaagattaattaattaactatactatctttttactttcctatcttatctgtaggccattggtctgttaatatatataaattgctctgtttcctgctatctttccatttcttaattaaatattagaaaaatgcccaaggaaaaacaatacaactgagcttcctttctggttttcatgcttttaaaatttataaaaattgtggctctgctgcctttttttttttttttttttttttttgtagttagatgaatttggcctgagattctatgaaaaaaataaaacaatagtttttatttcatgatttttttttcaagttgttctgattttataatatctagtcaagtgatgacatgcagagattttgctgtgaggagagggagagagcaaaaagtattctgccctgattgctttttagtgattttattactagaaagataaacattgccttgttattttagccagtaaaattgtctgcaaagtaggtaacaaaatgcaaagcagtgtatttacttttccactttttcccaaaggtatgataaaagcagggttccagtggaacaatttgctgagttctttcctagggagcactggtagcccgtattaaatgattatattttggaaaatgctaatgatgaaagatgagaataatttatattctttgaaatgtgactaaaaagttggaaatgaaacctatctttctgaagtgacatccacatttgtggttcattttcatcacacctgattcacttctgccagcaattcagaaagaaaggtggaggtgggaaagcatatatgtagctaagctactaaagtgactatttgagtatttcattccatctgtcaaaagattcagtgggataaagaatttggcataaatggatgtaattcattctctttttacaaagaagtaaatgatagaacaaaatcatcctaaaatgaaggaacaaaataccagaaagtgaaagaaaacaaaatttgtattttttgatagaatagtagcagaactcaatgtaaaaataatgattacattaataattatttgctcactttttcctgtatttggtattttgggaaagtgggcttgaaaaacagtggatacattgatgaaacatttcaattttcacttgcctgttgtgtttgctcatgttagacaaactataacttctcggtgtatagatatgatgtacacaaaattacacagaaattaagccatgtataataatgcatgactagaagaaagatatatctcccttgaacaaataacagttattttagtaaatttgtaacagagaaaataggcttgattaacaaaaatatgaaagatcttttaaataaatgaattttgaattttcagagtagcccagaattttatctaaactcggattatttcattagctagaacatgaaaataggcatttattctactcacctacagcttctgtagtactaaatttatggaatgaggctttgtggtgctgccttcagagctcaatgatttgctttttctgaattttggaagtctgtctctaattgattgacacatatgaatgtagtgggaagaaatgagattaagcatacaagctttctttttcatttaaacatcattgaagccatgaatttgtaaattgatataaaaacacaatcctttggatctgtattaggaaatttataaatgggagctttattttgctccagaaatgtgataattagaaatatattcaggtgattttttccctttggtttttgttgttttttaatttatttttctttcttatttttaccaaaggttcaagtcatctgtaatattcaggtgtttttaagaatttctcatggcaagttaattgtgggtgaacatttccctattggactaccagatgtactttgtggttataacttgcatagctccaggatttttcgtgaacaagtaataaaacacatttctggtttgctttctgccatagagtattaagagtttaacactttttaaatgttactttaatctctgaaattttcaacaatgattagtggcagtatactcaaaaaaggaaatgtgtaggctttactataataaaaataagaacaacttatataagctccacactttatagatttgtatggatatacaatcaaatgtactaatttttaaattatcctcattttgcagtaattttacattttgctcatttgtgcaaaccgtggtgatagtaaaatatttaacagaaattcaagcacattcttttaactctttctgaaaaatctcacaaatgagatttttttaaaacagttaagaatttactaaatttaaaatgtatatatacctgatgccatccagatgttttattgaatttctaaaataaaagtccacctaatgaatggctaatttactcaacacgtaagacaaagatgtatttctgtgttactaagaacatgcatcctatctccttgacaatggctctaattacctcagcttggactgatcaatatttgatctttttcccaccatgcaaacatgttactttgactttgtctcttcctcttcttttcagataatttgcagccatgtgagaatggttcattttgtttgttctccctggcttgaggccaggggtctcttattagtataatgcagttcattgatgtgaatttgttgatctcctgggtaggttttcacaaatttaaggcaattaaaagcttttatatggcatttcacttgaagttattagtggcctttcagtgattttgcttttaaaaattacttcatcattttatgattatttcctttccttctcttttctctactctccccatgctataaaattctatagtaaaggattgaaacaactatttcattgatttcattaaaagtaataatttataaacttataattcaatagcttaatattttaattaccacaatttttaaaggactaatgaaatttttggttttgtgttttcaaaagctgctttgttttaagcatataaatattcatgatagaagccataatttggagaataataagaattgaatctaaaaattattagtaattgctaaaaaattcaaaaagcacatagtgtaaactttgtgtatatgagacagaactttttctaaattgcagtttcattaacatcttaaagttttctcgtagctaacagatgtccatgatatttttgcttccttaacttttacagtcaatggaccattctccagcaggtcataagtaagaatgttaaataacggccactaaatcttaaggaatgtgacaacattgattagattaaaatcctttgacttcattgacatatcttttttctttccccatttaaaaaattgtttcagttgttttcctactgtttgttggtggcatactttgttacagtacttgatccagtttgtttcattggtgtgcttggtaaatttgaagaaatgatcactggagaggatttgaaataactagcaaaagttttgaagtattgcagtgagtatatggaatgtgttactcatttatgcaaaaaatattggtgtttttatactttttattttaaaaaatatataacaataatagcaaatatttagtaagaatgtaactttatgccatactaaggcaagaatagtatattgaataagaggatataccctgaaggcagggtataaatccaagttgcgctgcttactagttcacttcttaagcagttaacttctgaatctctctttatgtgcaaaatggtataggagaggaaaaaaaatatctttccctcctgatatgtacatgactggggcctctataacaaaaacagattaacaagagaaaagtatactataatttaagtgtaagttttacatgacatgggagccttcataaggaaatgaagacccaaagaaacagctaaatctgagtgttttttatattaggttcaatggtgaaatgatagggtatgaagtaaatgtagtaaactgggtgaaacttggcaaggcctttttgtttggattcccctctgtctctttgtctttggagaaaagatgctcctttatagagagggtaccattcacataagggtcttgtgacctacttaagggaaaggtcaaaaaacagttaccaggttttatgatctgtttctagagaaaagggcaggggacagtcagagagaccttcctgcttctgccattttctcacattccttcaccttaaaattttcaatatatcaaggtgctatattttggggtagtatatcctgaaccgtgcctataggaatgatgataataatatctactttataaggataaaatgagacaatatgtataaattgtatggaacagtgcatgaaccacaataaacactcacaaaatgtttgctataaagatattttcgaccttccatggtggttcatgcctataatcccaacactttacgaggctgaggtgggaggatcacttggagccaggagttcaagaccagcttgggcaacatagcaagaccccatctcttaaaaaaaataaaaaataaaaattacccatgcctatagtcctaattacttgggaggccaaggcaggaggatcacaattgatcctcaggaagatcatgcttgtctgtaaaggattttatatccccttgacttatgaagcttagtttggctggatatgaaattctgggttgaaaattcttttctttttttttgagacagagtctcactccgtcaccaggctgaagtgcagtggcatgatctcggctcagtgcaacctctgcttccctggttcaagcaattctcctgcctcagctgccctagtagctgggactacaggtgtgcgccaccacgcccagctaatttttgtatttttattagagacagggtttcaccatgttggccaggatggtcttgatctcttgacctcgtgatcctcccgccctcggcctcccaaagtgctaggattacaggcgtgaaaattcttttctttaagaatattgaatattggctcccactctcttctggcttatagggtttctgcagagagatctgctgttagtcccatgggcttcactttgtgggtaacccaacctttctctttggctgcgcttaacattttttccttcatttcaacctttgtgaatctgacgattacattgtgtctgggggttgttcttctcgatatgtatgcacccaatacaggagcacccagattcataaagcaagttcttagagacctacaaagagtcttagcctcccacacaataatagtgggagactttaacaccccactgttaatattagacagatcaacgagacagaaaattaacaaggatattcaggacttgaactcagctctggaccaagcagatctaatagacatctacagaactctccaccccaaatcaacagaatatacattcttctccgcaccacatcgcccttactctaaaattgaccacataattggaagtaaaacactcctcagcacaagcaaaataatagaaatcataaaaaacactttctcagaccacagtgcgatcaaattagaactcaggattaagaaagtcactcaaggctgggcgcggtggttcacgcctgtaatcccagcactttgagaggccgaggcgggcggatcacaaggtcaggagatcgagaccatcctggctaacatggtgaaactctactaaaaatagaaaaattagccgggcgtgatggcgggtgcctgtagtcccagctactcgggaggctgaggcaggagaatggcgtgaacccgggaggcggagcttgcagtgagccgagatcgcgccactgcactccagcttgggcgacagagcgagactccatctcaaaaaaaaaaaaaaaaaaaaaaaacctcactgaaaaccacccaaccactgctcctgaatgaatattaggtaaataatgaaattaagacagaaataaagcagttctttggaaccattgagaacaaagacacaatataccagaatctcttggacacagctaaagcagtgtttagaaggaaatttatagcactaaatgccctcaggagaaaactggaaagatctaaaatggacacactaacatcacgatgaaaagatctagagaagcaagagcaaacaaattcaaaagctagcagaagacaagaaataactaagatcagagcagaagtgaaggagatagagacacgaaaaacccttccaaaaatcagtgaatccaggagctggttttttgaaaagattaacaaaatagatagactgctagacagactacttaagaagaaaagagaaaagaatcaaatagacacaataaaaaatgataaaggggatatcactactgatcccacagaagtacaaactaccatcagagaatactatagacacctctacgcaaataaactagaaaatctagaagaaatggatacattgctggtcagataccccctcccaagactaaaccaggaggaagtgaatccctgaatagaccaataacaagttctgaaattgaggcagtaattaatagcctaccaaccaaaaaaagcccaggaccagatggattcacaactgaattctatcagaggtacaaagaggagctgttggtgggagtgtaaattagttcaatcattgtggaagacagtgtggcgattcctcaaggaactagaaccagaaataccatttggcccagcaatcccattactgggtatatacccaaaggattataaatcatggtgctatgaagacacatgcacacatgtttattacagcactgttcacaatagcaaagacttggaaccaacccaaatgcccatcagtgatagacgggataaagaaaatgtggcacataaccaccatggaatactatgcagccataaaaaaggatgagttcatgtcctttgcagggacatggataaatctggaaaccatcattctcagtaaactaacacaagaacagaaaaccaaacactgcatgttctcactcataagtgggggttgaacaatgagaacacatgaacacagggaggggagcatcacatactggggcctgtcagggggtaggggactaggtgagagatagcattaggagaaatacctaatgtagatgacgggttgatgggtacagcaaaccaccatggcatgtgtatacctatgtaacaaacctgcgtgttctgcacatgtatcccagaacttaaagtacaattaaaaaataataataaaattttaaaaagaaaaagattgggtatttcacatcttcttgaatgtaaaactgggggaaaataatcttttttaatgtgcattaaaactttttttttttttttttttttttttttggggggagaaggtctcactctgttgccctggctggagtgcagcggtatgatcaccgctcactgtggcctcagcctcacaggcccaagtgatcctctcacttcaggctccaagtatctggactcaaaggcgtgcaccaccactcccaggttttgtttttttttttttttttttgcagagacagggggttttctatgttactcaggctgttttctaactcccagcctcaagcaatcctcttgcctcaggttgccaacgtgttgggattacaggcatgagccactgtgcctgacccagtgaaacattttagtgcagaatagttgtgaatttttgaaatagataaccaagaaaatttaacttcagatatcacctagttgtaagttatctctccgttttgtcattcaggaatgggttttctgagactttctaaagaaatatatattatcgttcagtttggctttggaaattttattattgccctatatttctagtaaagtaatgtagatctagtttgatacaaaccattctatacactacaccggtactatcagctttcacttttcacagctcccaaaacaaataaataaaagaaaatagctttcttttctatgccgtttctttctgaaatagtactaatctgccttacctttaatactatcccatagacccacctagtagctcttcccttacgagagagttcttttgatcagataaggtttaatatggaaaataaaaagaaataatcatttaaaacttgaccaaaatattttaaaaacatacacatatatactctaccttaacatatggtgaaaagcaatttttcctaaaatatattctatgaaaaaaaaattttggccaggcacggtgacttatgcctataatcccagcactttggaggctgaggcgggtggatcacctgatgtcaggagcttgagaccagcctggccaacatggcaaaaccccgtctctactaaaaatacaaaaaattagctgggcacggtggtgggtgcctgtaatcctagctacttgggaggctgaggcagggagaatcgcttgaacccaggaggcagaggttgcagtgagctgagatcacaccattgcactccagcctgggcaacagaacgagacctcatctcaaaaaaaaaaaaaatttatttccaatcagttggaaaatgtaagaatatgcaaaaatttaacagatttctttaatgtgggtttttcctagaacacctttttacatttcagaggacattagagttcagcaggacacagtttggtaaatattagtataaaaagttaggctcagccgggtgcggtggctcatgtctgtaatcccagcactttgggaggctgaggtgggcagatcacgaggtcaagagatcgagaccatcctggccaacatggtgaaacctcgtctctactaaaaatacaaaaattacctgggcgtggtagcacacgcctgtagtcccacctgctcgggaggctgaggcaggaaaatcgcttgaaccagggaggcagagattgcagtaagcctagatggtgccactgcactccagcctggcaatagagcaagactccatctcaaaaaaaaaaaaaaagaaaaaaaagaaaggagaaaaaagaaaaaaatcaggctctctgtagtcaaaagtcaaacatttttactgctaaaataaggcattattttttttccttgcttaattgccatgccaacttttattggttctttcctgtctcccaatgagttaaaaaagaaaaaagtatccaaatgtgttcccaccccaacccaagcctgtgatcacttctttgtttttttgcttccctgtaagggtatttctccctataattatactcacactttaagaagtaggagccattatactttattttcaaatttcaaattagaaagtgatttgggtttggaagcttgtttctgtctctggctatccaactgtttctcggctccaagatgtgaaactgtttcttcaccctaacggcaaaagggcacctgctattgagcgtgctttgagcgttattctcccaatagtaccctagataggtaagacatttttgaaatcaaaaataaacaaaaacttcttgttgtgatttctctgtataccaaaacatcctcttgacataaactgtgttatcctaatgacacagacaaacacaaattatcttcatttgggttgcagagttgggggtcatttcttgtgcttatgagcctgctattctgcaactgtgagatttcagacatgttcaatttgtggattttattttttattacacacacatgtgtagtattattgcttgtaataccttgtatgaatataaaaagattgtcatttttcaggtgtatattaacttcattaattttttacaattcaaatgatggagagattcctattgaaggatacttagctttttctaataattcagttatgattttatattcaatgtaaatgattttgtctctctggggccagattatcctatttaccttgaccccctaccatgacaatttaaatactgcatttaactgtagtatatgtaagattgtccttaacaaatatgagacttgaaaggttgtttttgtttgtgtcctctcctctgaagttttccttttaggatgacagcatacgatagatgtgttctagtaaagtgcttcttttattcatgaattacaaatagcttaagaaaatgtttaaagtaaagctataatgattagtcctggtagtctccattttattcagaatgtctctgtcagaaattatgtcatcactatggactgttagccaggaagttctgtctagcagatgaatgaatagggagtactgagttttctaataaaagacactgttgtaatattgaaatactgctaatggaggttgccagttttctgttcttaaatttacaggacatcttctgtgattaaagtaaggaatacttagagcaagtccttagagtaaaccaactataaacttaagaaaccggaaatagaattttttttttttaaacaatgccatttaagtccctaacttgtcttggttcagctgctagacatttgttcctttgtctcaaaaacgttagcagaaagcaataaatatagttcttgctttactcagctaacatctgattttatctgcacattgcttccatcttaaaactttcttaccttactagtctgaatggcttgtgtagcctaatactgttataattgtcagaacaaagggtttgattattttggcaaggaaaaaagcctggtaatagtatttgcatttcaattaattgtttcattctgatttgaaatgtgacttatgttagatacatctctgatccttccctatctcagtactaatactaatatgttgtatttccactacaatagcattacatcttacaaacatttatttcctttataactgacgtagagctttccacatagtagatatttaatataattgatggtttggaattcatacattttgtaggctaagtataactctcctactgtttcacctacttcctaagctagatttatctttacaggtactagactttatagaactaatggtaaattcagtatgcatatcttctgtagtaaacatagaaaaacatttttgtaatagtgctccccaaattttagtttcttgactagtaatgaaatatcttatctgtactagagttttgttatacaataatgacagcattttcatgtgctatgttatggccagttaactaaaaataagtggatatttaaaatggaaaatgaaattatcctgttgcctgaaatatcttgactcaggttctattacaggttgcatatggtatctgttagagctttgaatctatgttggttgttgagttattatgtgcattaactattgcattcaaaagttctttaaaagcatatgtctgttttaaatcttatacaaattccttgcaggttttgagagcagtctttttgtatgtctttcttgtttgttgttttgtttttataccagagcaccatgtcctaagcagcagtaaatttaaaacattgcttaggatagttttataatatcattaatagatttttatattagatagtttctctgaattattgacctattatagggaacatggaaaaatttagaaaaattagaagttatacggagtattaagaaaaaaactttatattttggtactcccaggaaaactaaaacctctttctaagagtatattttaggaaattttctaaaattttgtaaatcaacctacagagaaaaaaagtatagaaagtattttgaaatatttgtgtgtatatgtgtgtgtgtgtacacaagccacattttctcctagaactcactactgaaatttctgaaagtgattcaataagatatatatttcatatctggtttttaaaatccatagaatttttgtgttttgaccatcaggtagagtcttacagtttagtcacagtggaatcatcagcttcaaaatgaaagaacaagatagtctcttggcattcaaaaatttagcatactttaactcatatttgctgtgatgttaggtagtgaattattcttgttaactatctagcgtccaatgtgacatgtgtttgttgttacctacaacttatcaaataaacagttaccctctggaatgataagaacttgggctttttatgaaaaataccctctaaatgaggacagaaatctatattaaggataggctattgattaaatttagagatacacataaagatgactctcatataaaatttagaataaacatgaaagttttagcatgtccagactttagggatttaggctttatgaaggtctcaagcctgtctcctggaattccaacattgtgatgactcaaattttatcagtaaatatggaaaaataagctaaagttcttgagaaattgctatctaataagtgattattttattttttttctagttttaaaataaaaaatctttactatttattagattcaccagtgttttatactgggggtccccaacctttttggcaccaaggactgtttcgtggaagatcattttccacagggcagggtgggggaggggtggtttcaggattattcaagtgcattgcatttgtcgtgcactttatttctgttattattacagtataatatataatgaaataattatacaactcaccataatgtagaatcagtgggagctctgaacttgttttcctgcaactagacagtcccatctgggggtgatgggagtcagtgacagatcatcaggcactagattctcataaggagcacataagctagatccctcacatgcacaattcacaatagggttcgcactctaatgagaatctaatgccgccagttatctgacaggaggtggaggtcagacagtaatttgagcaatgaggagtggctgtaaatacagatgaagcttcacttgcacatctggcactcacctcctgctgtgtggcccagttcctaacaggccatggatttgtatccgtccatgtctgaggggttggggacccttgttttatacaattctaattgtgtcattgaatttcttttttcttttttctcattgttaggaggctaaaaacaaacttgtcttgtgcagattcgtcgtctttaccaccaaatttttgtcatggtatcttgtcttttttttacgtctttctaaactgccttaatccttgtaagggaataggtaaggtgtaaatataattaataaggtgcaaggaaatgttattagaaagaaattagattgttatttgaaaacatacagagcctaaatgtaagagaaatgtcctaagcaaaacttattaacaggaaatttactgaattggaaagtactcttgattttatgactaatatgaattgaggtattcttatagacactcagagattcctgtacacatgttacttgtgtttttccaaaactatatacgtatagtctttttacaaataaacagtggccaccaagaaaaattacagcagtacacataagacataccgtatacatgatactcaactttgtctatatcctttgtgttcaagtttctagaaattttcatctttgtaaggatatcatgtgagtgtgctcaaggtttgttctaagaatctagctgagcacagtggctcatgcctgtaatcacaataccttgagagtctgaggcaaaaggaacatttgagcccaggagttcaagaccagcctgggcaacatagggagacccccatctctattaatttaaaaaaaaaaattacctggacatggtggcatgcatctttggtcccagctacttgggaggctgaagcaagaggatcaagaggatcacttgagcctggaaggtcgaggttgcagggagccacagtcatgactctgcactccagccttggtgatacagcgagaccatgtctttaaaaaaataaaataagaatctatacacaattcatggaatgatgttgttttatagttttactgtatatttgtttctgtcataacttccaatatcccaaaaactttttaattatttttattcaagacatacatacagaagcaggccaggcacagtggctgatgcctgtaatcccaacatttttggaagccacgatgggtgggttacttgagctcaacagtttgatgctacagtgagctatgatcatgccactgcactgcagcctgggcaactatttaagaaaaaaagagagagagagagaagcagaaattcaaaggacactttttgaaatgcacttaatgtaaaggctgctttgcatggttaatttattcctattaaaggaatactacattcctgccacttttctaggtggtgaatttatagcagcgaccaggtaaatattgctgtcctcagggtgcttacctttcagtgggtaatgctttaaacaaaatatctagtatattagatggtaataagaaccttggagaaaaataaaacagaaaagagtgttcaggtctagcatgaaaggttacactttcaaatctgatcattagggaaagtctcacccaagacagtgatgtttaaaaatatttcaagaagcaagttgtgcacatattagggagaaaaacaatcagtgaataaatagcaagtataaagtctctatgccaggagcatagcatgtttaaggaatagccaggagattaatatggctagagtaaaatgagcaatgggaaaagtaagtaggagatataattacactgggaaagagtctaggggcatattaaataagactttataggtcattataaagactttgttgtttttgttttgttttgactctgaatgagatcaaaagcctttagagggttttgtgcagacgagaaacataacatgacttatattttagtagggttattctcactgttatatggacaaaactgaatggggcaaagatagaaatagggagatcactttggaggtcattgcaataatccagtgggagatatgatgacttggactagagaattagcaatggaggtgttaagatacaatcaggctctggatatagtgtgtaggtagatttaatagaaattgctgttgaattgaagaatagtttacgagagaaatgagtcaagggtggaagcttcattaactaagagagggtaaatggggataatttggtctagttttgtataaattatggggaaagtcttggtctcatagtttagcattccatagtacgttctccatagtgtataagtgataggttttactaatttaataatttttttgtctcaaacttgtgacttagactttgataaacttctgtttatgatagatggatttttaattgattttattgtttgtattttataatggattttaaggcatattagtgaaaacacaacttaaaatttattttcttaccttactaacattccaaaaaaggaacatatactgtataatgtttttttgtctcactaatatattcgtatccctcttcccccttcttggcaaacttgtctgaaagtatactgttgcatgttatgtcatggatgtaccggagcatgtgtgtaaaatacatgtcataaatggaagcagctggtttcctatgcagttaagagaagaaatgcatacagctgagctcttcaaacttcagaactcattggattcagtttctatcctgtgtaagcatgctatgatttcaaatagtacaaatgtataacaagttaccttaatagcttaaaaaattattttgtttcgatagttgaactactaaatctgttttattctctttccctctgccttcagtccctacttacctatcctacctcttgaaaagaacattacacctatagtcttagttttaaattcgaatctgaaaaggccttggcaagagttgggaaaaagttatcatctcaaagggaaaagctgaattcatacacaggaactgcaggattactctggcgttttactagtcccttgcagcactcgcaagtcccataaatacctaatggaaaaacagcagaaaatgagatctgcagcagccttttgagatcaaatttatgttgctgaacatttttttgaggttgagtgtaaaggtcaaaagaaagtgggtagattaaagttgctgatttttgcaaacttaaggccatttttaaaggtttctctttctgtagcaagaaaatttcaagataaatggctttgcttcattagctgaaatgtcatgtcttcctttaatatctgttacctgagacatttagtgatttagtggtatttatatacaacaaataaaaatctcaatccactttaacaaatctagataaatttatgaaattgcagatctttccaagaacagcatgatgataaattaatgtatatatacatgtttgtattgccatgtatatatgtatcttaaatgacatattttagatgtttttgtatgatacagaaggaaaagataataatcaaagttttgtatttttaaagtataggttattgatccagcagtgtaattataaccatctttttttaaaattatttcttatattaaactattacaatgaagataaatgacctcaaagaaaagatcgtgcatgtaatagcattaaaacaaaattcatggatgcttttaatggtctcttaccttttgaacaacattttaacacgttgttactggtgcaagcctatatctaagaaactgtgagttactagggtactgcagacttgatgcaatgaagaacaataaactgccatttctggacatctctatcctgagttgatagtacagaaagccaccacatatgttaacgtgaagttatagattatttatatctccagggcttgcttcgtgtctttgatttcgtagttcagattgcccagttattagtacttagaattcaaaagaataagataaaaaatttttacttaatacattcatttctgcatcacaataaagagttttcatggaaattatccagataatttcatagtagaataatatatgaaatgaaatcttttcttttttatggtagttgataattaatagtaaatctattcagtttatctctaagaagtcagattatgggagacttgtctctatttttctctatttaattttcccaaaaaaattcataaggaaaatattaattttcatttaaatctctatattaaacattaagtgatctttttatgccttggaatcacaatgaatataaatgttatttttattgtagttgattttgcagtttcaattcatttctattaaatattttaataaacatttttatgaaactaggtagaggtcacaaatctcattagtcactgacagccaattctcaaacccaggtcttttcctgtataccacatttcctcattagttctcactacactgtatggctatttccgcctcttaactttttatattttattacactcttaaagtacaactgtacttctcttctcaagtgcccttttctattcagtaagggtcccaggtgagcaatgattctgactggggaagagggagaagatggtgttgtagcaagtagtattaaaaggcccttaggaaggtagatagatgtataattttgtctctttcttctcactgttttcgtaaagacaaaggctatgccttaacttttttgccattcttatttttgagactacccattagggattgtttttgatgttgttgagatgaagtatttggtgaagccaaaacctccttgacttttatagttttaataagtttgtgctctccaaaccttcataaagtaatgtctagtgatcctttcagatatggcatgctgtcatgtcagctttaaataattgttaatggcatgatttttaacattttacctagttagaatcagtaaaatttattatatatactctttgctgatcagtagagcctcttatgaaggagtcagtatgatgtgctggatagagcattagatggcaaattgggcctcagatattattaggcatagttttgccactaatttgtataatgtgcaagtttaataacctttctgggcctacagttctcctcttctgaaatggaaagatgaataggttatctctaaagtctatccagatctaaagatctattttattatagaaaacttttaatcatacacacaaagatagaataaaaataaatggcattatgaatccctgtgtattcattacctgtcctcatatgttatcaatagtaaccccttagtatcttctaatacctagttcatattaaaatttcaattaaagtatctagtccatattaaaatatcatctcagtaataatagtttctagttgctttgttttgttcaaattataatctagacaaggggtgtgtgtgtatgtgcatgtgtgggtgtgtgtgtgtgagagagagagatctagttgtgtttttaagacttatggtcaaaaatacatatcataaaatttcccactttaggctgtacatggtggctcacacctgtaatcccagcactctgggagaccaaggcaggaggattgcttgagcccaggaatttgagaacagcctgagcaatgttgcaaaaccccatccctacaaaaaattatgaaaattagccgggcatgatagtgcgcacttgtagtctgagctactcgggaggctaaggtgagaaaatcacctgagcccaggagtttgatgctgcggtgaactgtgattgcaccactgcactccagcctgggtgatagagtgagcccttgtctcaaaagaaaaatattttttaaccttttaatttattttttagagatagggtctcactgtgtcacccagaactggagtgtagtagtgcatagcatagctcactgtaaccttgaactcctggggctcgagtgatcctcctacttcagcctccagagtagctaggactacaggcacacaccacctcacccagctcattttaaaaattttttgtagagctggggttttgccatgttgcccaggctgttctcaaactcctggcctcaagtgatcctcctatcttggcctcccaaaatgctgggattataggcataagccaccgtgcccagtctatcttaaccatttttaagtgtaaagtacagtaatgttaattgtatgcacattgtgtgcaatagatttcttgtacaaacaccttgcaaaacggaaactctgtagccattgaacagtaattcccctttgcccccttcatacagccccaggcaaccaccattccactctgattccgtgaatttgactattttagatatttcatgtaagtaggatcatggtttatggctggctttttatggctggcttatttcacttcccttaccatgatgtcctcaaggttcatccatcttgtagcatatgacaggatttccttctctcttttttttaggccaagtaatattccattttgtatatataccaccttttttttttttttttttgagatggagtcttgctgtgtcacccaggctggaatgcaatggcgcaatctgagctcactgcaacctctgcctcctggatttgagcaattctcctgcctcagcctccggagtagctgggactacaggtgcgcgcaaccacacctgactaatttttatatctttagtggagacagggtttcaccacattggccaggctggtctcgaactcctgacctcaggtgatccgccttccttggcctcccaaagttctaggattacaggtgtgagccaccgcgcccagccacattttctttatacattcatctgctgatggacatttagattgcttccacttctttgctattttgaataattctgcgatgaatatgggtgtgcaaatatctcatcaacatcttgttttcagatcttttggatatatttccagaagtgagattgctggcatttttaattttttgaggatacttcatagtgttttcatagtggctttgtcatctaacattgtcagcaatagtgcacaagcgtttcaatttctccacattctgtatcttctttgaaaaatatctattcaagccctttgacaatttttcatttggattctttcgggggtgaggtgttgtggagttccttatatattctgaatattgatcccttattggatatatggtttgtaactattttctctcacttcataagttgcctttttactctgttgtttcctttgctgtgcaatagtttgtaagtttggtagtcccatttgtcttatttttccttttgttgcccatgcttttggtgtcttatctaagaaattattaccaaattcattgctgtgaaacttttttctccagtgttttcttcttggagttgtgtagttttaggttttaaatttaattgtttaattcattttgagtttatttttatatacacaataaggtaagggtctaactttattcttttgcatgtggatatcctgtttttcccaccaccatttctcaaagaaactatcctgtatgcattatcagtactatactttttctttttttttttttttttgagatagattctcactctgttgcccaggctggagtgcagtggtatgatctctgctcactgcaagctccgcctcccaggttcacgccattctcctgcctcagcctcccaagtagctgggactacaagcacctgccaccacgcctggctaattttttcagtttttagtagagactgggtttcaccatgttagccaggatggtctcgatctcctgacctcgtgatccacctgcctcagcctcccaaagttctgggattacaggcttgagccaccatgcctggcctatcagtactatactgttttgattgctgttgctttgtgtaatatgttttgaaatcaggaactctgaggcctctatctttgtttttctttcttgagattgttatggtatttgggggcctttgcagttttatatgaattttagaatttttttctatatctgcaaaaaaatgtcattgggatttgtataggaattgcatgtgcaaaggaatctgtacattcctttcagtagtatggatattttaacagtattaagttccaatccatgaacacaggacgtcttttcatttattggtgtcttctttaatttctttcatcaatgttttgtggttttcaatgtaaaaatcttgtgcctccttggttactcataagtattttattcatttttaatgctattattaatatatttgttttcttaattttctttttgggttgttcattgttagtattttcaaacacaattaattgttttatgtttattttgtgtcctgcaactttgctgaatttatttattcctcctaataggtttttttgtatgtgcagtctctaggctttttatacatacaagattgtgttatctaaagaaataattctacttctctgtttccaacttgtatgcctcctatttcctctttcctttctttctttctttagctgactgctctggatacaacttccagcactactgtgttgggcctggtggtatgctcctgtagtcctacatacttggaaggctaaggcaggagaatcacgagttcaggagttcaaggttacagtgagctgtggtcataccactgcactccagtctgggtgatagagcaagatcccgtcggtaaaaaaaagtggcaaggggggcatccttgctttattcattgtctttgagggaaagctttctgttttttaccatcgagtattatattacccatcggcttttcatatacagtctttattgggttgaggtgatttcctctgtgccttttttttatttaattataaaaagatgttgaattttgccaaatagtttttctgcatcaatagagatgtcatctagttgtgatgtctgataagattcttctttctgtaagtcattttcctcccctccactccattttttagctttcctttggtttgtcagagaagccaggtcttacatttgtctcatataatgttctacaaggttcagtgcttccttttgtagtgttgttcctctatcacctaatttcctaataagacctagaaatgcattgtcgtctggtagctactagctacatgtggctctttacctgtacatttttaaaaattaaagtttaaaattttcagccattgtagccacttatcaagtgctcatatagccaaataggggtagtggctaccatattggatagtgaaaaggaacatttccatcatcgcagaaagtggtctcatataaagaactgatatgacagtgttttttccatactctattttgtctttttccacatgccagctatctcaacaccatttggggctatttttagatgtcataattttagccaatactaatgggtatttattgatatctcattgtggctattttttcatcaatagttttttgtttgttttggggggcagattttgtttgtttgttttcatttttttgagatagggtctcactctgccacccaggctggaagacagtgatgtgatcatggctcaccgcaaccttgaactactgggctcaggtgattctcccacttcaacctcctgagtagctgggactgcaggtgtgcaccaccatgcctaatataaatatatatatatacacacacatacatatacacacagacacacacacacacacacacacacatatagagagagagccactgtgcctggcctaaatagttttattttgaaataattttagatttatagaaatgttctaagatagtaaaaataagttccatgtactcttcacctagcttctcctaatattaacaccttaaataactgtaggatcttcatcaaagctaaattaacattggtacaataccattaactaaactacaggtttattttcccagtttcttaagtaatgtcctttttctgttccaggatctgttggaggatactacttgacatttcattgtcatgttgctctgtcttgccttctcttttgtggccttgacacttatgaagagtagaggtcagatagtttgtaggatatctttcaatttgagtttatctgttgtttccttgtaattagactgaaattatggggttttgagaataccaccactgaggtgattttgctttcccaatgtatcacatcaaggtgtacgtagtatcaatctgttactgttagtgtgaaccttgaacatcaagttaaggtggtgtccattgggtttctccattgtctatttgttcctttccatatacagttcattagaaatgaatcactaaatccaccccacacttgggggtgggggggtaaatacaaaatgaatagtgtttagaaacctcatagaggaaggatatagccaccacagtaattaataaatattagtggagagatattatgaaattatgcaaatattctagttttttaaagttttacccactgatttatagcatttattagtggatattgcctataccaattacaactatggtgttctaatggtgattttctatttccctcatttattctatatttaataattcaaattctttaaggaagatttgtctctttgcttccatttttaatattctttaatttttttttcgagatgggttctcactctatatctcaggttggagtgcagtggtgtgatcgtgactcactgctgcctcaaccttctgggctcaagtgatctacctgagtagctaggactataggcatgtgccaccacgcccaattaactaattctttttttaagaggcagggcctcactgtgttaccgagcctagtctcaaatgcctgaactcaagtgatcttccctcctcagcctcccaaagtgctgagatcacatgtgtgacccaccacacctactctgtattcgttttttacaaattcagtagtcttttcttttctttctttcttttcttttcctttattttctttctttctttttctctccccctttcctctcctttccttcccttcccttccctttctttcctttctttcctttctctcctttctccctcccctcccctcattctctctgtgtcatccaggctggagtgcagtggcgagatcatggctcgctgaaacctcagcatcctgggcttaattgatctcccaccttaggctcccatgtgtgtgggggtgtgtgtgtgtgtttgcatgtgtatgtagatggaatttcactgtgttgcccaggctggtcttgaaccttctaggctcaagcaatcctcacaactcgcccttccaaagtgctggaattacaggcctgagccactacacctggtttgtttccatttttcataaattctgcctggtgcggaggctcacgcctgtaatcccagcactttgggaggctgaggtaggcagatcatgaggtcaggagatcgagaccattctgaccaacatggtgaaaccccgtctctactaaaaatacaaaattaactgggcgtggtggcacgcacctgtaatcccagctacttgggaggctgaagcaggagaatcgcttgaacccgggaggcagaggtttcagtgagccgagttcacgccactgcactccagcttgacaacagagcaagactccatctcaaaaaaacaaaaaacaaagcaaacaaaaaaaaacaaaacaaaaaacccttaattgtcatttatatcaatagggctcatggatatttatttagttctttgggttataatctaaaactgtgtcacttttactactcaaattcgagatttaactattgagagctttgtcacattggcttctgtatcattgtgacagacctgtcatctttttattactttcttactttctggcactacaagatcatctagactttctgtaccccagcttgtttctccaaggatcactggttcactttatcaaagagaaggaccaggcatggtgactcaattctctaatcctaacactttgggatgctgagacagaaggatcacatgaggccaggagtttgagaccagcctggacaatgtagtaagacccccatctcttaaaaaaaaaaattagccaggcatagtgacatgtgcctgagacctagctacttgggaggtttaggcaggagaattgcatgagcccaggaggttgagcctgtgtgagccatgatcatgacactgcactccagcctaggtgacagagcaaggccctgtctctaaacagagaaagagagagaaagagagagcgaagagagaaagagagaaataaaagaagaaaagagagagagggagaaagagaaagaaaagaaagaagagaagagagaaaaaggagggagagggagggagggagggaaggtaggtgggaaggtgtttcaaaaccagcatctgagcactgttttctcgtaagctactggcagtaattgcttctaggttctctcagcagatagaattaggaaatatgcttatgtctgctaactcatgtatacatagacacacattgtatttaatcctgttacctatgtgtgtttataatatatataaaatcgtgagtttataatggtatctcttactctaattcagtaccacagagttcatgctagcatttccctttgacttattttaacttccttctctgatagtgagaaagctggctctgattatttgacatgtatttacttatttatgcaaacctagtatacatataaagtcgtttaaaaattgctggctgggtacagtggctcatgcctgtaatctcagcactttgggaggctgaggcgggcagatcacctgaagtcgggagttcgagagcagccttaccaacatggagaaactgcgtctctaacaaaaatacaaaattagccgggcgtagtgacacatgctgtaatcccagctactcgggaggctgaggcaagagaattgcttgaacctgggaggcagaggttgcagtgagtcaagatcgtgccactgcactccagcctgcgtaacaagagcaaaactccatctcaaaaaaaaaaaaaattgctgaatcatacctctgtgataaaccaatttaccagaatacaatgcttatatatagttctttttgtctttagcactatagtatgtaaaggaaatactgttggctacagttatttagggtcttttcattcccaccactttcagtaagtttatttcatacatatttaatacatttagactaatttatcacagtttgcattccatcttgggttcccttaacatcctaattgatatttttaaattagtatttgctgaaagaaacctaaaatattgctcctttacggtagttggtcccttccacctgccaaccatgggaaaagttaatctgtttttcatctctgtagtttggcattttctagaatgtcacatacatgaaattataaaatatgtagactagtggttctggcttttttttacttagcaaaattcatttaagattcattcttattgtgtgaatcaagtttgtgtttagtatgtaaaatatatagtttaaaccagatattttggggctgatttctgttattgtatggtatgctttctgtactatgaggattttttaatttgtttctatcttttgccatatcctcccactttggtttgtgtgtatgtttcttccaataatttgtgagacttgtatttttattcaagtgaccacatttagatctgtaacttcatgtaacatgattaagatttttttatttaaaaaaaggtcttttgagacatggtctcactttgttgcctaggctggagtacagtggcatgatctcagcttactgcagctgcaacttcccaggcacaagcgatcctcccacctcagcctcccgagtagctgggtttacgggtgcatgccaccaggactggctgttgttttacaatatgtttttagagatagggtttttccatgttgcccaggctggtctcaaactcctaggctcacgtgatctacctgccttagcctcccaaagtactgagattacagtagtgcaccactgcacctagccaagattttttaaaagataataagtattctttttcggggaattcttcattctcttttcctagaagatttttctttcccttagtgtttttaagaatacttagacctcaattacatgatttatcagcttttcaggatctccttgacccctggctataaaagatgaggaaatctttcttaccctcatagtctcacaccttccctctcccaattactctattttgtatatttgttcccgagatttataacatttatattgttctgtaaccaaacatattctcctccctcctgcaaatttttgatcttattcataacagttaaaaggcaataaacagaatcaatgtttatagctaagcctttcataatagtcattttatctcttggtttgctgaggtttgttctggtggtttcttcagaaagtcacatagaaactatatttcccaaattattttatgttctaaattttgtctcttcatttatacttacatggtagtttgaccagatacaaaattaactaggctatctttccttgaggaggtaatagacattgctcttttattatagggttttttggtttgtttgctttaatgagatagggtctcactttgttgtctatgctgatctccaactcctggcttcaaccaattctactgcctcagcctcccaaagcactgggattataggcattagccactatacccagcctatcttagaactgtatttatttatttctagagacagtgtttcattatcactcccaggctagagtgcagtggagccatcacagctcattgcagcctcaacctcctaggattaaatgatcctcctgcctcagcctcctgagtgtcagggactccaggcatgtgccaccacacctagctaatttttaaaaaaaattttcatagagatgagtgtcagtctgttgcccaggcttgtcttgaagtcctggccccaagcagtcctcccaccttggcctcccataatgctgggattaaagacatgagtgaccacacccagcaattctttaaatgatactttgaagaacctgagcacgcacatatatttcttccctctttgttagtaactctcagttccttatctagctttatttttctgtcacctggtgtatatattccttggattatttgtttgctgtcatctccatctatagaatgcaactatcaatagtaaagggatttggtctgatttgttctctgttgaattccaaatagcttgttagtgtttaatacttagcatatagctaatacacatttattgaattaataaggtcagaattcatgattctgccccattctccatccttataagtactttgatgggtttgattgcttacaaaaggattcgtttcacattttgaattcccgtgcctttactcagatatgtcttggtcttcactactgtgtgtcagtgttgtgctctttccaactatatttttctgtgctatttctagaaagttcttccacatgtatctttttttaaaaaatatttttttgagacagggtcttactctgtctcccaggctggagtgcagtggcatgatctctgcccactgcgacctctgcctcctggtctcaagtgatcctcccacctcaacttcccaagtagctggaaccacaggcacgtaccaccacacctatctagtttttgtattttttgtaaagacgtggtttcaccagttgcccaggctggtctcaacacccgggactaagcagagctcacctcggcctccaaaagtgctaggattacaggcatgacccatcgtgcccagcctcacatatctttatattaggattgcagcttctgttttctactattcccactggcctggtttatcattctctatctcttttagccactttgttttttgttggtttttttttttttttcattttttttctccctacccctctcttttagccactttgaattggtttgttttagtgtctctttgccatacagcagagaattttcttttgcttcctgaggcaatctgaatatactttcatgtcaataagctgctgatatatttggcctcaaacctgtcatgttattctataattactaaatatatatgtatactgtttttctgtgtgatttattatctctgctgtttttaaattttttattctggcattttggaaaggtttatatttcttttctagccattagcttttcttttaagtgtgctttttatggtggccttaatccccatttttcttataacattctactctccaatcagttttaaatgatatcctttgattctcacctattatctatacaacagtgattttattctgcatttttctctcacttctttgttttaaaattgtattacttctactttgtcagaatatgcagtgcttacaaactatgttctttccatcctttttaatttataattataattatcttattaaatgtaatgaggtttaccaacaacagtcctgtgtttgagttttcccccaatcatgcttggatgaagcttatcttctaatacatttctcaggaaaggcgtatgtgtacagtatcctctgtgttcttttttttctattactttatactttttcctacacaaagacagcttggctgcatataaaatccttgactttatttcttggaaataatgttctagttttgtcttgctttgtgttttgctcttgaagtctaaggcagcctaattttctttctttctttctttctttttttttttttttaaagagacagagtctcactctgtcacccaggctggagtgcagtgtggtatgatcatactttactacagccttgatctcctcagctcaaacaatcatccaaccacagcctcctgagtagctgggactacaggcatgtgccaccatacctggctaatttgttgttttttgttgtttatttgtttggttggttggttggttttgtttttgtttgttttttgtagagacagggatcctgctatgttgcccaggctgttctcaaactccaagcctcaaatgatcctcccacctcagcctcccaaagttttaggattataggcatgagccaccacacccagtccctagcctaattttcttattcttatttttctaatttcttactcttaattttatctttttgcctgtaggcctgaaaatactgtttcatcattaaggtctaataattttaccaggatgtgtcttagacctttcttgtttggggtcagtttttccaggtatgcaataataagctggaaatatagtttctagcttatagagtaatatggtagctcatgccttgcacatgcttttacaccagcagcacatcttttaaatgtgtagatttaaattttcatctatttctggaaagttttcttagactatattttaaatatactattccattgcgttattttttcctcaaggattctgtgtttatgttggatcttcttttcctgtcttccatttcatctactttctctctttgttatgtctttcttctctcattttcattcttttggttgtttgccttcattttttcagtgtacctttttagattttcactttattaatgtattcagcatggtgcactttgtaatttatttctgggattgttttttccttttattgcatttcttccctgattactttgtcctagtaatgttgaagacatggtcatatattgttttatttgtacttcttgtggcttattgagagaatacgaagataaatttggtttcagattattgccattatcctgaaatagattttgaactgtttttctgtgctactactttgttactctaatttaggaatgccatttatattatcttagattcacttttcctcttgttctgtccttttctcaccaatttattttattacctttgttagttcctatttcattttgcttgctttacacagtcctgacctccattttatttactatatttttatcagtgtttttttctccatttctttgatggttgcatttttctttcacactctcttgagcccagccagtttgtgtttcaccatctgttaatatgtttaattataacttctctatactttagtgtctctgcttaatagggataattgcttcatgaattttgtccatgcatttgcttataattgatgtgtgttccattactatatatttctgttaaatgtcttgtatgtgtcatttactttgctactttttttttcttctgtcctcatacaaattctgttctggttcctttttcatttctcatcttcgaatatggtattttcctacattagctattttacatgaggtttaattaaggaaggggttacacatgtatttcatactatgaagaattgtccatatgatgcacatatgccagttcaattaatggtcttaactcaggacaatacaaatagtacctattgtttcctaccactattcctaagcaccttatatcagattttcttttccttaacccttggagacatctagggaagattcatcgtagtttttagtcactttcagctgttaaggaaattgccctgcttttggttatttaaacaaattttaagtctgttgttaaaaatgtcagtcttaaactgtgtttgtattagtcctttcttgcactactatgaagaaatacctgagactgggtaatttataaagaaaagaagtttagttggtttatggttctgcaggctctacaggaaatgtggctggggaggcctcaggaaactttcaatcatggcagaaggggaagcaggcacatcttacatggctggagcagaaggaagtgagacaagggggagacgctacacactgttaaacaactatagctcattgaaaactcatgcactatcacaagaacagcaaggggaaaaatccaccctcatgatccaatcatctcccaccaggcctctcttgcaacattggggattacaatttgacatgcagcttgggtggggacacagaactaaaccatatcattctgcccctggcttctcccaaatctcatgtctttcctacagtgcaaaatagaatcatcccttcccaacagtcccccaagacttaactcatctcagcattaactcaaaagtccacaatctgaagtctaatcagagacaaggcaatctcttccacctctgagcctgtaaaatacagttagttacttccatgatacaatggagatacaggcattgggtaaatccctgttccaaaagggataaatcagccaaaagagaggggctacaggccccatgcaagtccgaaacccagcagggcagtcattaaatctttaaactccagaataatctttgactctatgtctcacattcaagccacactgatgcaacgagtaggctcccaagggcttgggcagttctgcgtctgttgctctgcagggctcagctcccatgtcagctctcaagggctggcgttgaatgcctgcagcttttccaggtgcatgatgcaagctgtcggtggacctaccattttgaggtctggaggacagtggccctcttctcaccattccaataggcagtttcccagtggggactctgtatgaggactccaaccccacatttctcctttgcattgccctagtagaggttctccatgagggttcacccctgcagcaaacttctgcctggacatcaggtgtttccatacgtcctccgaaatctaggcagaggctcccaagcctcatctcttgccctctgcatacccacaggctaaacactaggtagaagctgccaaggcttacagcttgcaccctctggagcagtggcctgagatgtatctggggctcttttttccatggctgggacgcagggagcagtatcaaggttgcacagggcagctggtccctgagcctggcctaggaaagcactcttcgcttttatgactctgggctggtgatgggaggggctgctgcaaatgtctctgaaataccttagcagcattttccccactgtctcggctattaacatttggctcatttttacttatgcaaatttctacagccaacttaaattcctgcccagaaaatttctcttttctaccacacggtcaggctgtacattttccaaactttccaaattctgtttcccttttaaatataagttccagtttcagatcatctctttgctcacatatatgagcatatgctgttagaagcagacaggatacatcttgaatgttttgctgcttagatatttcttctcccagataccataaatcatctctctcaagttcaaagttccacatttccctaaagaaggagcacaatgctgctagtctctttgctaaagcatagcaagagtgaccttcactccatttgccaagaagttcctcatctccatctgagacctcctcagtctggacttgactgtccatagcactatcagcatttaggttacaaccatttaacaagtctctaggaagttccaaacttacccgtatcttactatattcttatgagccctccaaactgtttcaacctctgtgtgttacactgttccaacgttgcttccacattttcagtcatctttatagccatgccccagtcgtaggtaccatttttccgtattagtttgttctcgtactgctataaagaactacctgagactgggtaccttagaaagaaaagaggtttaattggctcatagttccgcaggctctacaggacatatggcttgggaggcctcaggaaacttacaatcatggcagaaggggaagcaggcacatcttaaatggctggagcagaaggaagagagacaagagggaggtgctacacactgtttaacatccagatctcattgagaactcgctcattatcacaagaacagcaagagggatatctgccccactaggcccctcttctaacactggggattaaaataaacacgtgattcggatgggaacacaaatctaaacctatcagtgtttacattttttatttttattatttttattacaaagctcagctttccaatatactctgcttataaactgaaatttttaatattatttaaaatgtcaattctccctacagtgagccatagaatcaatgcctttccaaccaaaaaacaagatttttgtgaaactttaccatacatttctatggaaaagcaaaacggcaagaatattcaaactactcctgaagagggacaacaaagtgggatgtagcctaccatatatctgaacattctgtgatttttgtaatatagcagttcgctattaggacagtggtagaccagtgtaatgggacagagaggacagagacagatgccttcatttccataaggaaatggttgattattcaataaatggtgctgcgataattattttttcataacaaaaaagtgaaatcaaatttctgttttatactatacacaaaaatcaatttcaggtgaattatagatctaaatatgaaggtaaaatgacagagcttttggaaggtaacttttgagaatatctgtatgatctcggggtgtggaaaaatttcttaagcaggacacaaaagcataaaggcaaagactaataagttgtaccacattaaaattaagagcctttgtttatcaataggtacctttaaaagattaaaaggcaagccactgagtaggagaagacatgtgtgacacaaataacccagaaagaattaatatccataatatattttcaaaattttagtaatcaatatggaaaagacaacacagaagaaaaatagtcaaaagataccaacaggaaatttaccttagaagaaaatcacatgtgtattgaaggaatgaaaaattgttctacctcatcattaattagggaaatgcattagccgggcatggtggcacatgcctgtattcccagcaattcaggaggctgagacgggagtattgcttgagcccaggatgtcaaggttgcagtgtggtatgatcttaccactgcactccagcctgggtgacagagtgagaccctgtctcaaaataaataaataaataaataaataaataaataaataaataaataatcctttgaaaaataagggaaattcaaatgtaatccacaatgaggtatcattttataccagttgataaaaattttaaagtctaaaaatttcaaatgctgcataaaattagaattactgactcttacacacttgaagatacaaattccctactatccccagaaaatgttattgcttttagacactaattatatccaatatctagaacttagtctaataaactatgaacaaggcctctaccaagaacacttaaaacataattgtgagaacttaaaatgtaaatggaggtgtgttttaaagatgtttatttattagaagactcaatactgtaaagatgcaatatttgtccattttagtctgtaatttcaatgcaattctgattaaaatcctaacaagtaggggtgtatatgagtgtaaattgacaaactcatttttatatgtttttggaaagtcaaaggataataatagccaagaccatcttcaagacaaataagatgggagaatttactggtgatatggttaggctttttctcccatatccccaaatctcatcttgaattgtaatccctataatccccacgtgtcaaaggagagacctggtgggaggtgattggatcatgggggcggtatccttcaggctggtctcatgatagtaagtgagttctcatgagatctgatgatattataagtgtagttgtcttttccacacttgcacgctctctctctctctcgcctgccaccatgtaagacgtgtgtcttccccttctgccataattgtaagtttcctgaggtcactctagccatgtggaactgtgaatcaattaactcttttttctttagaaaatacccagtcttgggcagtactttataaccgtgtgagaacagactaatacaactggatattgagtcatcttataaagttaaaataataagacattgtgacattggtgcagtgataaataatggaacagaataggaaacccaaaaacacaccaacaggtatagttttccattttgattgttcctttcattagatgtttaaaactttataatgaatatgtacttttagtcaaaatttatttacttgagaagcaaagtgatgtatggattatggcctctgaggctataatgtgagtttgacccaaataatgatccaaatgtgagttccagtcccagttttgtcctatactactagctgtttgagcgtattcaactggtctgtggttcttagtttttttatctttaacacaagataataaaattacctctcagaattatggtgagaatttgacataacaagtataatcctgctggcacatgctgttcccttgatgaggggaatttgttattatgtttcttaggaacacaaaacttctgtttattcttggtaagaattcatgtttcccagatctatgtgtactatttgttatatttaaggttatcaaattgtatccttggtaatggttgccactggatcttttttggaatatgtacaactccttattcaaagtggctttctaatcatgattagttttttgtagttttggaagagccatattactgccctgcattcataaagcagtcttgtaaacactgattatgatagtgttttgaaaaattaaaagcctccaaaatcactaatttttaaaaaataatgcagttaaatatagaaaaggattagccatagatattttgtagttaaccctattatcattaacctaagtgaatagaacctaatttttgtacttgctaataattgctattaagaattttgttaatcgtgtgtggattggtgcttgagttcagaatgaatgattgataggggacaactctaagaaatacagcacttacattaatgttttattaaacagaaaaagctttaatgttttattaaacagattttaagagttacagtcttaaaatctttattatttattttatgaaatatttcattttgttttttttctgggcactttaaaattgagatgaggatggtagaatttgccagtttattttttggctattttttttttaacccatcttattttgagaacgaatttagtaatatttttctcaacatcctgaaattgtgtaacctgtagaaacttcccactgtctttttaaacttattcttaaataccacatttaatataggataaataagtcacaaagcttgcttatcaaaacagaatattgtattcagctttccatcggagcttttggggaagacatcacagtattgtactgtctcccaagatgcaaagtatcaggctttaaataatgaaaataagggaaatgccaatagaaaattagaaaaaatgttagaacagttaaaaacagcatactgaagcctgcattatttggcttatctaaaaatcatatgttttcaaccaatcagtacttatagtcattctatttaatcttttaagaaggagacataatccaccctcaccaagtgattcagtgtagcatcctaactaataatgacttaatgtgtgtccaaatggcatgtaatgagaagtatgaaacattgtctgtatactttcttgcctaagatacttaactgagtctaatcataaagttcagacatatcttcactgtggaacatttctacaagacaacggcctggactcttcaaaaatgccactgtcatgaaagacagtaaggagaatggaaggagactttcagattaagggagactaaagagacttaagcaaatgtagtattagatccttgactatatattagataatactacatcactgccacattttgtgcttatataggaaaatctccttggtcagtatgtatcataatagggtcataatgtctgcaacttattttccagtggtttgaggggaaaaaagacgtgtgtgtgtgtgtgtgtgtgtgtgtgtgtgtaaagaatatgttctaattgatacatatacgtaaatagcataggagtgttcatttgtactactctcaattttttctataggcttggtttcaagatgaaatttgaaaaaccttaagggaaaatatgtttaaagtatgataataacaaattagcacactagataaactttttatagcttttgtgagtttttttccttcagaaaatcatatttatgtagatagcaggattaaagaaaacttttctaaatttcagatgtcagaaatggagacatctaaattgtttttccatttcatctctaaatgctaatgaaaactggacttttacgacattaaagacatttaattgatctctgtgggatttcatgtttagcttttttcaacagctatatattgaacatttaggtgatgagattgagtagctaatcttagaggcgctctattgagattgtccagattccaaccctgatcccacaacttaccacctttgtgatcttggacaagtaatttgagatatctgtgcctcattctcctcaaatattcaacaggataataataatacataccagtttcttaggattgtagtaatgcttaaatgaattaatatatttggagcacttaggaaagagccaagtacatagtaattttctaaaaattatacctacttattatgtggatctttgctgaggaaatatgagtaagcatacaagactggacaggctttgagtagtgaagatgttttactcacaagcaaggtaattatgccttttatattaaaagaaagttcatatggaacactctgcttatatgcttcatcttcttttcaatcagataataagttctccaatgtagaagggaaatgtcagcctcacacataaaaatatacctgtcagagattatataagtgtcaaaataatactatctagagaaattcaggacatttggataaataaaggaatgtcatgtagtttggatagaacatagagaagtgaggaaaggagacattcccagatagaataacagctcaatgacttgaacaaggatacagatgcatgtagtatacacagtggactagaccatttatgtgtgtatgtacatatgtgaaaaaaagtctttgaaatgtttgcatttcaattaaattctgattttaagaacttattttccccctgtatcctgtgtgtgctagcattctgtttcctaaggcattctttcagacagacatacctagtcctgaaaatgctgctattattgttccagatacaaagcaggatgtcataattttttttttttactattccaactggaataatatggctcaacttaagttctgtacaaaactacttaatgataactcacaaaattaaaccaatttatattttctgcagttaaaatagaatgcacagatttttaaagacctaggacacattattatatctagttcctgaaatcattaaatgtccatggggaagaaaaaaacttgtgtaagtaggaataatataattggatttgcaatgctctcttaagagattctttaaaatcatgtgaaataagtagagtttctatgattttttaaaaatcacaaatagcatatatccgttttatctttaatagtgtttgagcccatcatttgaaagcattggagcatgtaaccaatatttctgaaaatgaaccatggttccagtcataatctatatgctttaaaattccttccctttattctttcttcccaaatccatgacatctgaatttcaataaggaagaaaataagcatgtttttaaaatgttttagaaaagattttcaaaattagattaaaatgtttgaggaaataaaaacttctttatgtattcattgtgatactgatttttatcaatgtctttttgtaaaaatacctatatactaactttgaataggtccaacatatggtaatgtgttatgcaattaatgataatgtagaacgatgttaaacccacagaatattgccaaggatttaccaacaaccaaaaatgtaattatatagaagaaaagtgtagttacaaatgcagtcttttgtctttttacattctctatatgtagagggtaacagaaatactgtatcactttttagtatatgttctcccagaataagttgccacaattagaacagagtttaggagcctatattaagctttactagttatggttatttccatagtgctagtaaataagagaaaaaaactttttgaacccatgtctcattgtaggtctcctaaaggaaagtggcccaaagtccaaatacttcaataccgttcgtctctgcctgataacaaagtgttttgtttttgtttttaccctcggacaagccagtcagctgatctttgtcctaatttgttcctggtagaattgaacaagatgtttgcagaagcttcctctagtttgaaaattgtattgattttttttccccatagtaactcacagatggcttctcaggttggaaataatggtgtccatgtttaggtaccacgtgttagatcagatttgtactcatggatctgtgattattttaactttttcttgttatttataaaaataattatgtacttctctctggggtttaatgtgtctttttattctcaaaaaatgtagtacattgatcagccacctaaaatactagccctatagaattctaatagttaggttttatatacagccatttgtcgattaaatattaaataccggatcagcttaaaatggacacacaaaaaaacactaccacataagctatacagtgccttttttcacagtgtcttataggtggaagatactcagtgagtgtttgttgagtgaataaaggatcttcacttggtgcatcccatttccttacaatttattattttttattttactttactttgagtcaggatctcactaggttgcccaagctggacttgaacttttagatccaagcaatcctcctgcgtcagcctctcaagcagctgggactacagggatatgtcactatgttcggctttaatttttattttattatgaaagttttcaagtagcaaaagcgatgtaatgaaccccatctacccattactgagattcaataattactaagattttgccacacttgctttatctagtctttaaagaaatttctccactgaatgatttactttaaaatacttgacctcctggccttttactctgtattttaaagaaagctgtagtaatttgtgacataaaccaatagagagcagctaaattttgttatatcttcatagcaattgactatattttggtttgtcttaccaataatttgatgaatgacctttcattttcaatttatctttggtaactaagtagataagtgggagtgtaggtttacttatttaaattctttgaatttgtgtgtgtgtgttgctttcccccccgatagaaactataaatggtagtgttattgtggttaggagtatggggctatggagttggggaaaacatgtatgaatctcagttctactactttaccttttgaatgtgggcaagacaagtctcagagttgttttagtttttttaattttaactttgaaataattgtagaaaaatagcaaaactagtttaatgaattcccatatgttaatatttaccacagctattgtatgtatgtatgtagagtttttttcctgagtcgtttgagagtaagttgcaaaaataatgcctctttaacctctaaatacttgaggtgtggttagtaaaaattcacgttttgttacataaccacagtatatttatccaaaacaggaaattaacatggataaagtattactgtcttatctagagatcttattcaaattttttcagttataccactaatacccttcatggcaaaagaaaaattattttattcttaggttgaatccaagatcacatgttacatttagttgtcatctctagaaactgctggtagtcctagctatttgggaggctgaggagggaggatcacttgagcccaagagttcgagtctgacctgggcaacataataagactctgtctcttaaaaaaaagaaagaaaagaaaagagacagaagaagaaaacagaataagctcatggactgttataaaggcaataaatgtgacataaaggatgctaaccaaaacagataaatagtaaaaggttaaataacagaggacttagctatttgcaagtactgacaaattttcatgattgggcaatgaatgatgtgacgttaacacatctgactttatctttcatgactttgatatttttgaaaagtataggctgcttattttgtagaatgtaccttaagttttttttatgtttccttatgattagatttaggttatgccttttcataaaatactatggatatgacctatccttcatgtaccatattaggaggtacatgatacctgttttatcctattgctgatgatgttaccctttgatcataacattatattttcaaatttctctaccataaagttaccattttccttttgtaatggatctcttgtgggaagatactctgagagtacctaactatcctatttctcattacatgttcacatgctagttttgacatccattcttcctagagacagttattactatggagattgccaaataatgatttgtttttcattccatcattttttctgcatttgttagttggctttcagcttcaatttttatatctgtaaaatgaacctaattgatgtaaaattggttaataacacccaaatcatgtagggtataagataatgcattttattttattttattttactttactgagacagagtctcagtctgtcacccaggctggagtgcagtgagtgacatgattatggctcattgcagccttgaactcctgggatcaagtgatcctcccacctcaggcctccctagtagttgagaccacaggtgtgcaccaacacacccagcatgtatgtgtgtgtgtgtgtatatacatatatatgtatatccacacatacatacatacacacatctttacatatatagacctcatctatatatatatatatatctcatctatatagaagagatatatatagagagatatatagatatagagagagatatagatatatagatatagatatagatatagatagacatagatatatatctcatctgtatatatatagatgaggtctccatatgttgcccaggttggtctcgaaatcctgggctcaagtgatccacccacctcagcctcccaaataatacattgatttgggacaattcttagcacataactctttaaaatattagatattataatttttattatgctagtatctacttttcagttgaagaaatagatcattttaaagatctttgaaaggtcataggaaatgttaaaaatatcaggtattttatgtgtacctaccatgaatgttttacctcatctttggtaaggtcagaagtgagatgatgtaacagccatcatatgtatgtgtattttttttattgacctgagacagtttttggttatttaatgcagaaaatatatttgcagtgtacttcatatgatatgcagtactttaaatacttgttgtaatgtggtcatttaataggagagaaacttagagacatggtaaattaagttttgatttagtatactgaatgatgaaatagaattatttatggtcattttaattctttaaaagtttttaaattagtattttaaaataatatatgtacacagtttactgattttgtccttaagggtatactgtggaaaagagcaataccctgccctgtactttgacagcccttttagctatttcttcttttacctacctccatatttttaatcacctcacctatccaggttagatattatgtacttaccaacttcctactatgataagataaatatttgtctctcttatatacatacattctgtcctctcctcctctccagttctccagtagagtttttgataaatcagttttcagcataaataatattatacagatgtatgtattatttatttctgagacaaattatattctatggtgttttacaacttttagtttctcctagagtttagaattcccttatctttttgtttccttaggtttctttatacctgtggtgacttccatacacatatcttccaatagcttctcacatttattttgtgcatagttaaaaatgtgagttttaatttgtaaaggtaattataaatcatgtgctctgaaagctttgtttttcttatttttttctttctctctctttttttgtttttgagatatagtctcactctgttgcccaggctggagtgcagtggcatgatctcagctcactgcaacctctgcctcccgggctcaagcgattctcctgcctcagcctcccaaatagctaggattacaggggtgagccaccacacccggccaagttcttttgatggctcacatccttcattaactttctgagaaaaaatacaagggagataaatattttgagaaccaaagtgtctcaaagtatctctgtttactcactctggattaatatatgggctccatgtggaattctagtgagaaaatttattttctttagactcttgaaaccattgctctattatattctaaacttacatattgtttttgagaggtctggttcttttttttcctaagcctttatatatgatctgccttttctctagaagcatttatgatctgtctctggttttctaaagtttcatgataaataataatgatgtagatctcttcattaattcattatattaatacattattccctataaatttagacaataagtcagttctgtgaatttttaaatgaaattttacttcctgggttgatcctctatttttcattttttctttctttttgatttttttttccttttttttctctttcattgaagttgagctttttgcatactcttctcaagtgtctggtaatgctggtagtgcatttatatttaagagtgatgcactagacaatgtacaaaatgagacctttcaacttccttagggtatttgagtaaaagacagctttttcataggggaagtaatttacatgcaccttctccagggctatttaatttctccaaggaaaaatggattctctaattttctttttgggtgaacttaagcctaagtactggtcaggaaaagggtcagaagggctatttggtatgtaagtgttcacataaccagcccagcctgttcttagttcagcacttcacccatttccctatcttcctttgtgcttggagttcctgagtctgaagcctttccagttctttcctagcctaccttccctccattattctgcagaggtaggaaaaggacacttgtcaggctatatgaggtgggaatggggtctgaaagttctgctgttaattatctccctattttcagctctactagttacctggtaccaccattttctgaattttccaaggtttggagggtgaatcagcttgatttttgttggaatctcctcttagtaggcttttatactttagctttcttccccctgctaatctaattaccttttctccatatactgtctgacctcagaaattgtaatccaggattatcagtatcttctagtttttttactaatatggttagttgtaatttttcattattgtcttgagatgatttttgataggagaatgtgcagaaatgtttatattttggcatcagaaatatcacctttggagggggcgagggggtcttacctaggctggagtgcagtaatgcagtcacagctcacttcagcctctacctcctgggctcaagcaatcctcctgcctcagcctttcaagtaacttggactacaggcatgtgccactgctatggttttgctctgtgtccccacccaaatctcaccttgaattgtaataatctccacatgtcaagggtgggaccaggtggaggtaattgaatcatgggggtggtttcctccatgctgttctcatgataattaatgaatctcacaagatcagatggtttaataagcatctggcatttccgctgcttgcattcattctctctcctgccaccttgtgaagaggtaccttccgccatgattgtaagtttcctgaggcttccagccatgctgaaccatgagttgattaaacttcttttctttataaattacccagtctcaggtattccttcacagcagtgtgagaatggacgaatacagccaccatgccacactatgtttttaatttttttgtagacacagaatcttgctgtgttgcccaggctggtctcaaactccttggctcaagtgatcctcttgcttccacctcccatagtgctaggattataggcgtgaaccaccatgcctagccagaaatactatcttaaaatcaactctgcataattcactgacccatcattaaaatttgtcagtacttaaaaatagctaagtcctctattattttatttaaccttttactgtgtagtttatttgttttggttggtatcatttaagcctcatttattgcctttacagcagtccaaacagaacctattctgttttctttctcctcctctctcattttttttctcttttttaagagacagagtcttacagtgttgcccaggttggactcaaatgcttgggctaaagtgatcctccctgctcagcctcccaagtagcagagactacagggactacgggcgccaccttgcctagctccccctctctcttatcttctttaccctagttaaattatttctgctttgtcccaaaaaataatatttgtacattactctccacatggctttatggtggagtaagggtgatgcttgagtgtaagaagttttacactgggatgtggtacttttccttttttcacttatagttgttttgaagtttgggcattctttttgtcttcaaattgtgctgaaggcatggtgtttttgtagatttatttttctgtccttgttctatattcttttggagagaaacagggcttaggtggcaaccattgcttcagctgtctggaattcctcaatttattttaactttatataccatcttttctcccacctctctcttcattataagcagactcattcattcacagtatgtttagtgagtgctatgtgccaggcatggttctagggatatggtaatgaacaaatgtctttgccctcataaatattatattctggtggtagagacaaagaataaaacaaaaaagtgaatatatactataatgttaggtagtgattaatgctatgttttaaaaaaataaacaagatgagtgcagtggtacactcctgtagtcccagctgcttgggaggcagagacaggatggtcacttgagcccaggagtttgagtagccactgcacgtcagcctgagcaataaaacaagactgtgtctctaaaagtatagatatatcaatcaagaacctggggaagttctagtgctacctacaagagttgaggaagaccttttcttttttttttttcttttttttgagacggagtctcactctgtcacccaggccggagtgcaatggcccgatctcggctcactgcaagctccgcctcccgggttcatgccattctcctgcctcagcctccccagtagctgggactacaggcacctgccaccacgcccggctaattttttgtatttttagtagggatgggatttcaccgtgttagccaggatggtgttgatctcctgacctcatgatccacttgcctcagcctcccaaagtgctggaattacaggcatgagccactgcgcctggccaaggaagacctctttgaaaaagtgttacattagcaaattttgttttgttatagaatagtaagtacatctttttatattagcatttaccttatgtaaatcattaagattttaccactgatcaggtttccatgataaattgtttaattttaaaacttctgtagtagaatgggcatgtggtgttatggaattcataccaaataagaagaattttacagaaagtaaaaccataagctgtctactattcaactcttctcattctgctttagagaactgctattgataaaagattatttgagaaacatataatctatccttttctctaataactctacactttattttttatttttattatactttaagttttagggtacatgtgcacaacgtgcaggttagttacatatgtatacatgtgccatattggtgtgctgcacccattaacttgtcatttaacattaggtttatctcctaatgctatccctctccccttcccccagcccacaacaggccttgtgtgtgttgttccccttcctgtgtccatgtgttctcattgttcaattcccacctatgagtgagaacatgtacactattcacaatagcaaagacttggaaccaacccaaatgtccaacaatgatagactggattaagaaaatgtggcacatatacaccatggaatactatgcagccataaaaaatgatgtgttcatgtcctttgtagggacatggatgaagctggaaaccatcattctcagtaaactatcacaaggacaaaaaactctacattttatgcttggactatcagaaaaactgtttacttgaaaacagtttacagaaaaactctttaccctgacatgtattgatttgttgctttgtgttttttgagacagggtcccactctgtcacccaggctggattgcagtggtatgatcatagctcactgcaacctcaaactctggggctcaagcaatcctcctacctcagcctccctagtagttgggactacaggcgtgtgccatcacacctggctaaattctgagttgttttttatattgaagccttaatctttcattgaggaataccacaataaacagactgagcttgctgttgagaagttgttgaggacaacatagtcttctgtattaatgtttaacatattaaagaccctatgaaaagtttattttagaatcacgtgtttcttataagaaagtgacatttttggccgggcacaatggctcacgcctgtaatcccagcactttgggaggccgaggcgggtggatcacgaggtcaggagatcgagaccatcctggctgaagcggtgaaaccccatctctactaaaaatacaaaaaattagccaggcgtggtggcgggcgcctgtagtcccagctgctcaggaggctgaggcaggagaatggcgtgaacccgggaggcggagcttgcagtgagcagagatcgcgccactgcactccagcctgggcgacagagcgagactccatctcaaaaaaaaaaaagtgacatttttatctcttcaagcatgaaaagtagataactaggcatgtcttactttttgctttcactgtcaagaaattggaaacaaattcagagctaattcaagacgcctctgccatgtatttctttttctccccaatcttatactgttctgttttctctgatcattttttttaggttgtctcactaattatggaacaatggcagggatgtgtatgaaagagtgagcaggtagataagtcaatagatgaatgctgttgcctcctcaaatcattagttgtatgagcttgggtgagttaaacaacctttctgcactgttaatttcatctgcaaaatgagaggattaatagatcaaatatttgtagctgcagaactctgttttcatgggaaataatttggaagcccgaaatagaagccaagtagtagcagaactgttgtgtcaggccagtgccatagtggccgggaaactaagcctcattttttatccagatcatattagaactgcctcttggaacaaagaaacactacctctagtgtttctgcaatacagtgttctgtattacagccttgactactctactttttcccccactccagtcaagttttacattttgtagtaggcctcctttttgccatcttcgtgaagattctgaattttcctggatggataaaaatcataaggataataaatggatatttcagtgtttttttagtcagtggtttgcaaaaccacctggagggcttgggaaaacacaggttgctgtgtcctacccacacaggtttctgattcagtaagtctggggtatgaccaagatattgcattttgagcaactttccgagtgattcagaaattatactttgagaactactatcctatgtgagtattaaaaatgtattttagtcacttttcttattttaaaaattacatcaaatcatataacttcataaagctcagaaaacaatgtctgagtaatatatggtttttgaaaaataacatttaagtgacatattccgatgtcatggagcaagtgagaaactggtttgaaatgtttgctatctagtgtcaagggctatctatccctttttgacttcttgtgctactggtgcaaatggatagatattaatcctgcagcaatcaggatttgcttcagcaataaagaaattattgatgtctgaaagcaatcctttccttttgacatgttggcagcacctaagaagaaaatgtcagggtcaatataagtgcatttactgacagtttggctctttcctatgttacagaaaatgatttcacatttagcttttatcaaaaacagaaacactgaccactctgaaggatataaacaatagctttcagcttagtcattttccacttataaagtgatactttcatagaaataaacaatgcaaacttcagagagccaaaacaattacacagaaaaaaatcattgcatttttgccatttttaactcagatttaaaacaactgtgtctggtagtaactggagaaaaatcactgttttgtgttctgttaagttaaaacagttaaaatcactttatgataaaatatggccaaaaagaagaatcatcttcaattaggtacttcaagatcacttgtattctctgcttctctttcagagcctgatccatgtatttcttaaacttcttcatcatatataaaatttcgtgtttataaaatttccactaaaacctcaattattagtttcatgaatcagaagttacaattagtttcatttctggctcaccaagatttgtcaatttctggataaaagggactccctattcagaatatccctttaaatcttttttaaaagtgcacctttgatgtgtacatgtttttatgttatttatggcttctgaaaatattatgcaaaaaaattgttatggaaacaacccaaatgtccacaagcaggaagatacattgtgatagatccatacaatggaatatcattcgttcataaaaaagaataaagtactgatgcatgatagaatgtgagtgaacctcaatatcaagaaaatggacgaagccagacataaaggatcacatattgtatgattccatttatatgaagtatccataataggtaaatccacagaaacaaaagcagattggtagttgccagggacttgtggggagtgaggaatggggaataactttttaatgggaagatagggtttcttcttggggtgctaaaaatgttgagaagtagatagaggtcatggttgcacaacactgtgaatataattttatgtgaattttacctcaattttttaaagaaatcagttgatttaagacttaactgaattctagaatttttgaaatgaaggtgtttctcaaggtcatccaacccaatctcctgtttttcacaaatgaaaaaactaaaactcatcaagattaaatactatatatcactaagattgcctagtagctagtccaaacccaggccagaatttgagtatctggatttttagcccagtgatttctttttaaactactgcatgctgctttattatcaattgctattttttttaaatttttttctgggaacatactacaagtgttagtttaaaagtaaactaacataaaagtaaatacaaaaagaagcatagcttcctttgtgccacatataagaaatgtagacatagagagtgtttattgcagtaatttgccaaaaagcaagccatagtttaaattagaagaggtttattccctgcagcactttcacaatcacagaaggcacctatattttaaatgtagtctacattggcctggcttatgaactgcaaccttctatgattgcaattcacttttttaaattaaaaaaaatttcaaaataatttttgcataattattagcacattctaccacttgataattttttgtttctttcaatagacgaaagcactcacattgtaaaaaaattatataaatgaccttgtcttgtgatgaagctagaagatctgttttcaacgaaactattctcagaggcatctagggagaaacatttgagtcaggttgggagttagagatagaaagcagcagcaattaaagcaagataatgtattaccccctggaaattgggtgttatactcaaatgtaaaggacttgtattgatttagtgctagcctcagaaaatagtcagatgtcctcattttaagggaaaactttaggaaatgtaattatatcgtttctttctctctaaatctgccttagttttcaatttctttatgtagttcgttactaagaggaagctacactctcattaccacactaaatggattttctattaatatttatctccaatgttatttttatctgggttgttgttttcatttctacttagtatgtattttcttctttccttttagttcagaggtcaacaaagtatggcctatgagccatacgctacaatagcagagttgagtggttgcaacagataccatgtggcctgcaaacctaaaatatttattggggcattttacagaaaacacttgccagtccttgctttagttgaccaagtagaaaaggaagagcagattctacagagtgaataaatatcaccagcaaaggaaaggatatagaaaggtacaggatttatacttaggctagctagaaactccatatggtcaaagtaagagttttgtggatgtgagtcatcagagattatataggaaagatagattactgtcagatttagaggatttttaatgccacttcaggaacttgagctactattgtttaggaaatgagtcatttaaggttttttgaacaaaggagctttgccagagcaggaaagtgttgcagtagggtttacaaagtaatgagagttatcaactaaagttatattaataggaaggatgacatagttccaggagttgctgtataattaaaattgataggaccttagacactgcattttgagacaaagagataatagtttaaagattaaaacttcattgggcagaaaaattattatttatacacatattagggaagtaaagagctaatttttgtggaaggtttaagttgatggagaaggattataacactacataggataagaaacaaaactgattactagttatcagcattactgaagttgttcactcatcccaggcacaggcaattttttactcgccatattttatctccagggcacccagctgccatcatcttgtcagggtccatctctttataaaatcctcttactttgctctccagaatcccaccctgatacacagatttacttacgctacctcatacagaataaagtacttccattttccaagtactctgaaccatgctcaagaagggctttagctctctcaaataaaaagacttatctcaaggtgtttaattcaagtagagccacagttccgaaactgtgcactgacaccccagggtactgcagcagactcacaagagtgctacaggatattttatatcggtttcaaaattaaattttgctacattccttttggatgatgtctttttaaaaaataattactgttgttgttttttttttaatatgtacctcctgaaaaatcaatgcagaatgggaaatgaaggtagcagtatccacttggaatacaaggcttgaagagtgtgcagtattccataagcatacatattcatttagtaaatacagttaacccttgaacagtgccgggggttagaggcactcccctcccccgggtagttgaaaatccatgtataacttttgactccccagaaactttactaagagcctactgttgaccagaagccttacctgtaacattaatcattgatgaacatgtattttgtatattatatgtattatacagtgtatttttgtaacacagtaagctagagaaaagaaaatcataaggaaaatatattcattgatatggtttggctctgcttccccactcaaatctcatctcgaattttaatccccataatctccacatgttaagggagggacctgttaggaggtcattagatcatgggggccatttcccccatgctgttcttgtgatagtgagttctcgtggaacctgttagttttataagtgtttgacagttcctctctcatgtgccctctctcgcctgctgccatgtatgacatgcctgcttccccttctgccatgattgtgtttcctgaggcctccccagccatgcagaactgtgagtcaattaaacctcttttctttataaattagtcagtcttgggcagttctttataggagtgtgaaaacggactaatacatttattgttcattaagtggaggtggatcatcataaacatcttcatcctagtagtcttcacactgagcaggctgaagaggagggtggggaagagctggtcttcctgtctcaggggtagcaggggtggaaatgatgaaggaggtggaaaggatggcagaagaggtaggcatactcagtgtaactttacagaaatacgttgtaatttctgtcttatttttcatttccctaaaaatgttactctaaaaatgtttctatatggcacctatccttccaccttttgcttttggttcagtgcccatatcatagaagggtccatgttgtaaaagaagtcaaaagcagtcttttgaataactggaatcattctgttatatggtctaatatgaatttgtttctggcactacttattctacatcttctttctcatcatctggcactgatttggaagcactcatctccatcaagtcatcttctgttaattcctgtgatatggtgtctgttagctcttgaattactccaagatccgtatcttgaaactcttcaacttccccccacttttttttttttttttttgccatatccacagtctcttttatgatatccttgattgactctgttgtaaatcctatgaagtcatatacaccattggacacagtttttctctagcatcaatttatttttttgggcttgatggctttcatggctacttttgtaacaatggcgttttccatgatttgattctttcagatatccttggtgttctctaagttgaggtctacttccatagcattgacaatcttttctatagattaccatgtgtaatgatctttaaaggtccttatgaccccctaatctagatctgaattagagatattgtgtttgatggcaagtagaccactttgacacctttgttgttgaactcctggtgtgggtgacccggggcattgttcaatatctaaagaaatttaaaagacagttccttactgacaaggtacttctttgtcagcagaagttacttctcctcttatccattttttgaagccaaacctctttctaaaaatgtcaagccatcctttgctgacattaaattctccagctttaaatccttcaccttccttttgctttaagttgtcatataatgacttcaagtcttactagagtatgcctttcttatagcaattctgtactcacattgtattttaaatataagataaaaagatattttacagaaacttcaaggttttcatgcctgctgtcgtagctgcagtgatggctccacaaagtcctcccccaaccacaatggtccttacactggattcatctatcttgaaatggtgggcaaccacagctgcagacctcaatctacggtacatatcaagcaagtcagcttttttttgtaatgatttttctctgcttcttgggagcacttccagcatcactagtgacatttcatatgggtcccatggtgatgttcaagatttacagtattgcactaaacatgatgaaaaataattcaagaaccatgagagatcactttttattgcaatatgcaatttactgtaagatgtagggttcactcagagatgattagcatcagatgtcattttcaatggatacaacacttgagctcactgcaaaagcaacaggtggtagttacaacgttgttacaatagtacagtatttactgcagttcattttatgcagttaggatttaatactgaatttttacatttgtttacatttctcttgactcaaatgctgccgtgtatggtctgtaagtgtttgcctgtgtaagttttgatagattttaactttttataatacatttttatagttttatgatagtgataaaatagtatctacatatactttatgagttcatgacatacttaacaatttttatcaatatttctaggctacacagtttgtctgtagagtatttcaaactatcacaaatttccaaaaaattttctgatatacttcttgaaaaaatttttacacacaagtggatccatgcagttcaaacccaagttgtacaagggtcaactgtattgtagttattttttaatgagattttaaaaacttttttcaatttatatgtatttttcttaactgagtattaaattctgaagctagtacttattaaattgtttggacttaacattaaacaggactgttaggcatttgttagcataccatgaaaaaatgaaaaaaataacaaaaacactaaaaacactgtaaactgggaaagtttcagattctctgaatttgagagagttgttcaactctaaaatgaatgcattcttccataagcatgtgaaaaggcagcagtctttcttttttctctttttttcaaaattgctttctagactgggcacagtggctcacacttgtaatcccagcattttgggaggctgaggtggacagatcgcttgagcccaggagtttgagaccagcctgggcaacatggtaaaaccccatctctacaaaacatccaaaaattaaccaggtgtggtggtgcacacctgtagtctcagcttctgtggaggctgtgaggtgggagaatcgcttgagcccaggaggcagaggttgcagtgagccgagatcgtgccactccactccagcctggtgacagtgaaatcccctctcaaaaaaaaacaaaaaaacaaatttgaaaacacattctagtgacatgggattttgtgtagcatcttaacaaaaatgtaatcacatatttaaaaattttctgtgctttttgctgtatcaaacaaaaaaagtaagaagtgctcttccctttaaggttatggtcaggtcagagtggtaagacaaatacaagttgcttatatcattaagtaaaataaaataattaccctcatttatttcataatatcacatattatgggcattcaaagaagaatgtgtacatctgttagtgggaatgaagaaagaatttgttagattttaaatgggcattgacatgttggtaaattctaacatgtagaggtagtggacatttcagatagaaggaaaaacataaaaactcaagatttattttgggagaagcaaattattctatatgactgaagcaaggacatatgttatgaagtaatgtagattacagctggtttactataagttggagtactatcgtggagcactttgaatgctggggtgtgaggcatttggattcaatttactaggaaaagaagagtgattagggtgattaatctgtcagcaagatataggatgattaaatcaaggagagaaaggaggcagggatagctttttaaaagggaatgatggattttgctttatgtatatgtatttcaaaggaaacaccaaactgttgatctttaaagagcatacttttgttcagcactgtaactaacagttgtaacataaaactcacttttctgatgggaggcagaagactttctaactttcttgttatttctagaggaataatatcaatacaatgtaaatatgtatggaatgcatactataggccaagaactatattaagcatttatttaattctcacaacccttgagagacattattattcccattttacaggtgagaacagtaaagcctagtaaagttaatgttgtccagagtcacatagttaataagtagacagattagcaaaaatttttaaaataagtttactagttggtttaaactaaggagaattgagttaattctccttgggtcttatcaaattatcttcatctgacttaggcatagtttctctctttttttatttttcatatcactcctgatctcttcccaccatgggtactcttaatgtgtttgatatggctcttacatttggatgtgtcctttaagactgtattgtgttattttagatgcatgcatatgtgtttaaattatacataatatataaaagggtaaattatagcttgtctgatttgatatatatgtttctactctattgcttttatatttttattttataagaaacacacatttttattttataagaaacaaggtcttgctattaatatgttaccaagaccagaatgcagtagttattcacaggtgtgatcattgtgcagatagccttgaactcctggcctcaccctatcctcccacttgagcctcctaaatagctggaactacaggtgcatgcagctgggcctggcttagtttactgcttttttaaaaataatttacaaataataattgtacatattcatggaatacattatgatttttttttttttttgagacggagtctcactctgtcgccaggttggagtgcagtggcgcgatctcgcctcactgcaacctccaccccctgggttcaagcgattctcctgcctcagcttcctgagtagctgggactacaggtgtgcaccaccatacctagctaatgtttgtatttttagtagagatggggtttcaccatgttggccgggatgatctcgatctcttgacctcttcatatgcctgcctcagcctcccaaagtgctgggattacaggcgtaagccaccgtgcccggcccataatgatgttttgatacctgtaatgtatagtaatcagacagggataaatagcatatccatcatctcaaacatttatcatttctttgtgttaagaacatttaatatcctccatctacctatttaaactatttaatatatttttgttaactaaatagtcatcctgcagaggtatagaattctataacttactcttatctagttgtaattttggtatcctttaacaaatttttccctatccttcctttccccctactttcccagcctccaatatcctctgttctaccttttacttctataagatcaacttttttttatcttctacttatgagtgaaaacataccatgtttaactttctgttcctaacatttcacttaacataatgtcctccagttttatctatgttgccatgaaccacaggattttatgcttttttatggctgaatggtttttctttgtgtatacattacacattttctttatccattcatttgttgttggacacctaggtttgttccatatcttggctattgtggatagtgctgcaataagcataggggtacacatgtcccttaaatataatgatttccattcctttggataaattcctagtagtaggattgctggatcatgtagtagttctacttgtggtttttaggaaactccaactattctccatagtggctattcccaccaacaatgtattaagagttcccttttctccatcctcaccaacatttttttttctttttgataatagccatcctaactggggtgagatgatacctcattgtggttttgatctgcatttctctgatgattagtgatgttgggcactttttcatatatttgttggccatttgtatctcttttgagaaatgtctgttcagatcatttacctattttttaataagattggttttttgctattgagatgtttgagttccttgtatattcttagtattaatcccctatctgatgttatgaatagtttgcaaatattttttcccattctgtaggttgtcttttcactctattgattgtttcctttgctgtgctaaagattttcagtttgatataatctcatttgtttatttttacttttgttgcttgtgcttttgaagttgtattcataaaatatttttccagatcaatgtcctaaagcatttcacctgtgttttcttctaggagggttatccttttaggtcatatatttagttctttgatcatttttttgagacagggtcttgctgtgtcacccaggctgcagtgcagtggtgcgataatgactcactgcagccttgacctcctaggctaaggcagttctcccgcctcagccagctgagtagctgggactacaagcatatgccaccatgcctggctaatttttatattttttgtagagatagggtttcaccatgttgtcgaggctgatctcaaactcctgggctcaagagatccacctgccttgacctcccaagatgttgggatcacaggtgtgagccaccatgcccagcctctttgatccactttgagttgatttttgcatgcagtgagaggtagaagtgtagtttcattcttctgcatatggctatccagtttgctcaggaccatttattgaacagactattcattccccaatgacaattcttggcacttttgtcaaaaatcattttgctgtagataatgtggataaatttctgggttctctatgcctttccattggtctatatgtctgtttttatgctggtaccatgctgtttgtgttattatagctttgtgatatattttgaggtctgatagtgtggtacctccagctttgttctttttactcaggattgcttcagctattcagggttttctatgtttccatacaaattttagaatttttttccatttctgtgaaaagtgtcattggtagtttgatagggattgcactgaatctatagatgtctttccatttatttgtatgcacttcaatttctttcatcagtgttttgtaatcttccttgtagaggtcttttatcaccttggttcagtttgttcccaagattttattttcttttctagctattgtaaatgaggttgcctttttgaattcttgttcaactactttgttgtttatgtacagaaacactactgatttttgtgtgttgattttatatcctgcaactttatggaattcatttatcagttctaagagttttttggtagagtctttaggctttttaatatgtagaatcattacatatgcaaatagggacaatttaacttccttcttctcaattttgatatggtttatttctttctcttgcctaattgctgtggctagtacttccagtactatgttgaataagagtggtgagagagggcatcattgtctgttccagttcttagaggaaatgctttcaggtttcagtaagatgctagctgtgagtttgtcatgttgaggtaatttcaacatgttattatgttgaggtactttccttctatacctaatttattaagagtttttatgaaggaatattaaattttatcaaaagcattttctgcttttcattgagatgatcatatgatttttgtccttcattctattgataggatataagacattcattcagtgacatatggtggaccatctttgcattcttgggataatcctcacttgctcataatctttttgagacactgttgggttcagtttgctagtattttgttgtggacttttgcatgtatgttcatcagggatattggcctatcattttctttttttgttttgtccttatctgtttttggtatcacggttatgttggcttcatagaatcaattaggaagtatttcctctgcttcatttttggaataatttgggacaaattggttttaattcaacagtgaagccatccagttctggactttttttttttttttttggtgttggaagactttttgttattaaatcaatcttgtttcttgtcattggtctgtttaggctttctatttcttctttcagtcttggtaggttttacgtatccaggaatgtgtccatttcctctaggttttcaaatttgttggcatatagttgttcacggtagtctctagtgatcctttgtatttctgtagtatcttttgtgatgtctccttttttgtttcctattttaattatttagatcttctctcttttttcttattctagctaatggtttgtcaattttgtttagaagccagctttttgttttgttgatcttttgtattttttttgtcttatttttgtttatttctacactgatcattattatttctttccttccattaattttgggtttagtttattcttttctagttctttgaggtttatcatcaagttgtttacttgaaatctttcttgttttttgatataagcatttattcctataaacttgactctgaatactgtttttgctgtgtcccataggttttggtatgttgtgtttctgttttcctttgtgtcaaagaatttttaaattttattcttaatttctttctttatccattggtcattcaggagcatattgtttaattttcatgtaatggtatatttctaaatgattctcttgttatagatatctaagtttacgccattgtgttcagataagtacttgatattttgatcctttaagaatattttgagacttctattgtgtccttacacacgattgatcctgagactgttgaatgggctgatgaaaagaatgtgtattctgccactgttggctgaaatgttctataaatatctgttgtatttagtctatggtgcagtttaactctgatgtttctttgttgactttttgtctacataatctgcccagtgttgagagtgggatgttgaagtccccaactgttatttcactttagatctaataatatttgctttacatatctgggtgcttcagtattgggtgcatatatatttacagttgttatattctcttgttggatcaatccttttataattatatagtagccctctgtcttcttttacagcttttgacttgaagagtgttttacctcgtataattatagctattcctgtttgcttttagtttccatttgcactgaatattttttccatccacttccagtctgtgtgtgtatacaggtgatacaagtttcttgtagatagcatataattgggtcttgtttttttaaaatccattcagctagtatgtatcttttaaatgtggaacttaatctatttacaatcgtgttattattgataggtgaggacttactcctgtcattttattgattgttttctggtggtttgtatatcctttgttcattactttctctcagtgttatttttgcagttgaatggttttctctagtgaaaaggtttgattcctttctccttctcctttgtacagcagctctatcagtgtgttttatagtttcacatattttcatgatggtgattattgtttttcatttccacatgtaagacccccttgagcatttcttgcaaggccagactagtggtgatggattcccttagttttgctagtctgtgaaatattttatttgtcctttatttctgaaggttagctttgctgggcgtattcttgggctaataatttttttcttctagtactttgactatattatcctgtcctctcctggactataggatttctgctgagaaattcactgttagtctaatggggattcccttatatgacttgatgcttttatcttgctgcttttagaattctttctttgtctttgacttttgacaatttaactgtaatgtgccttgcagaggtcctgtttgaggtgaatatatttgagctttctcgacttggatgtctctctgtctttctgttattatttcattaaatatgtttttctcacctttcccttcaccttctggagatatttatttgcttaatggtatcccataaatcctttaggctttttcattctctttttttttttaaagttagtctgcctgtgttatttcaaaagatcattcttcaagttcagaaattcttcttcttggtctagtctgttgtttagctctttattgtattttttatttcattcattaaattcttcagctctaggatttctgcttcattcttttttatgatatctgtctttgttgaatttctctttcaaatcataaactcttctcctgactttgttgagttatctatcggtattctcttgtatcttattggatttctttaagattattattttgatttttttcccacatttcatatatttccttatagtttggagtctgttactagataattattgttttccttttgacattacatgttttcttgctttttttccttcttcttcttttaagacaagttctcattctgttgcccaggctggagtgcagtggcacaatctcggctcactgcagcctctacctcgtatgctcgagtgatcctcccacctcaactccccaagtagctggaactacagacactcaccaatatgccctgctaatttttgtggtttttagtagagacagggtttcaccatgttgcccaggctttttcttgctttttcacggttgatgtgtccctgtgttgatttctatgcatctggtggaaaagtcacctcttttaattttatggaatagatttcataagaaagaatacgaatgagtcttgggttgttggtttggtggggtacattagccttatttctagatacagttttgtagtctctgagtaatttcttcagctgtaatccactctagtggcatttgtgagtttctcagtggcatgggctgagagagtttgtggcaatggtgatgccactttgccaggggtgggctcactagactgtttctcaggtctggggtatgtatgtgcacatagtaggtcagccaacttggttggtgagattggcttactgagactggggccacaaggctgttactctgaccagaaatacaagtataaggttgcttgggcaacctggggacatgcctgccaggagcagctttcaggtcggggacgtgggcttttggccacttggctggcttggagatattccctgtggcacgggggcagtctgcgggactatctctcaggccattattgggggtaaaggactgttgggcaggccaagggcgtgcctatgggggacctgtgtgtctgtttctcaggttctgattgcttgcaggtagccctactctgctggccctgggccatatcaccttctcagaggctcagggaggtctcctgcttagagaagggagcccagcagtttggccagcttaagagcaggcttgctgtgggtaggactggcagactggtttctctgttggtggtatggccatggttcttggttttcttgctgtgcaagaccagaataacagccagtccagggtccagccttcaccagcttggatcatggtgttcagaaacttgtttggagttggcataatgaagatggagccccagttctggagaggtgcagtggccactttccccccagaggagggcatactacacaggtggctattctcaagatgacgccatgttacagcagtttggctcacagtggtgggatggggagtacacaccttgtgctcttaatccaggtcagtgcgtctgcatgaattcctggcagctctccaaaatgggctcagggcttgtgaggactatgggattcttgtgtagtaaggccttcatgtgtttgtggtggcaaagaggctggtagggatcttctgctgacttttttccctgcaatagcaattccctcccgtctccaggcagatctgatctaggtggggaagatgggaccacgagtttgagtgcctctatgctgccttcctagatttccaatcaccacaggtgcatcttcattctatcagtgcaccccactactcttccttcacactccagtcaaatcttagctgtttgtttgttgccttgatcctttttttgtgtgtgggttagacaagcaccaggtatccctactcagccatcttgctgatgttactcctttattgcttttcttttcttttcttttctttttttttttttgagatggagtcgcgccctgttgcccaggctggagtgcaatggtgtgatctcagatcactgcaacctccacctccttggttcaagcgaccaagtagcctcagcctcccaagtagctgggactacaggcacccaccaccacacccaactaatttttgtatttttggtagagacgggagctcaccatgttggccaggctggttttgaactcctgacctcaagtgatccgcctgcctcagcctcccaaagtgctgggattataggctggagccactgtgcccaactcctttattgcttttaatctctgcatagtagtgtgtgtattagtctgttttcatgctgctgataaaggcatacctgagactgggaagaaaaagaggtttaattggacttacaggtccacatggcttgggaggcctcagaatcatggtgggaggcaaaaacagaaacccctgagaaaaccgtcagatctcgtgagatttattcactaccacgagaacagcatgagggaaaccaccctcatgattcaaattatctcccaccagtctctcccacaacacgtgggagcacaattaaagatgagatttgggtgggaacacagagccaaaccatatcagtgtgcattcaccacattctcatcttttcccctagaaatagacttctaggatttctcacactttatgttcaacagagctatataaatatgctcctatgtattcccttaaagcccatcttctttctactatatctttttcctcattttacttccttttttgagggagttatgtgggatagaagaaaaatggacttcttcatttataacatacctgaagttgggagtattttaatccttaaacagattaaaatgagctgggtgtggtggctcacacctgtaaccccagcactttaggaggctgagggaggcgtatggcttgagctcagtagttggaaaccagactgggcaacatgacaaaatcctgtttctactaaaaatacaaaaactagctgggcgtcgtggtgcatgcctgtagtcccagctacttaggaggcagaggtgggaggatcacctgagcccaggaggtcgagggtgcactgagctgtgattgcaccactgcactctagtctaggcaactgggcgagtctctgtctcaaaaaaaaaaaaaaaagagtaaaagatatgcagactatgtgattttctgcttccaaaaggaaccacatagacaggaagaagatccaagtgaattattctcttctatttctttacattgccttctgtcattggtaacataacctttatggcattcacaagtatatttgttctagctttcttcttttagtaattctgttgctgtcgtttgtgtgaaatactgcatattataacattgtaattataaatgatttatacattatcttaatcgttgtcagggccaacgtttttcttacaagcagataggaactatgctttgttgtaactcatatttgatcgactctgagaacaaaatgtattttatactttcttggagtagtcccacaaaacatgtaggacccattaagaggaagaaagcatgctatatggttgttatatttgttatttttgacttgtaatttattcattctctcagccctgttctctgactagtgttactatggcacctaagttatggcatggaaaacaagctaattatgttcttcagaacagacgacagtgatacatcttgagacacaagcatctggtagtcttagccctttcctcatcagtgctagtctaggcttggttgggctctctggttgtccaaatatttttctgttacaacacatccttctttattttatttttcttctataaatagtggtttatgctttctaaagcctctagtctcatatttagtttgttcctttttgagccttctgtctactcaaagaagtaatatagacttactcccagctgtgtatgatctactcttactcctgtttattgagttaagctttttactatttgtaaacatctcttggttgtgtagacacaaatacaccaaaactaaaaatggttaaattggggtgaaaacttacggatatttcttacaatttatttttcaaaattcagtgatgtagttagatggctctcctgataaaaattgtttaagagatatgagtaatcaatacttttttatcagaagtgacatctaaccatattaccaaattttgaaaaacaaagaaaatattagaattatccacaatttttgtacctaaacttaaccagttttacttttgtttattcccttataatcttttttactattgatttaatgtaggttataatcatactgtgtacacactatttgtatgtcttctatttaattgaatatttatgtgccataagcattttctactttactacttagttttcatcatcatcatcatttgtaatatctttaaaatattctctggagtggtgctattcaatagaaatataatttaaaattttccaggacccatatgaaaaatgtaaaaagaaacagcttaataatggattttatttaatctaatatatctaaaatatttattgtttcaacatgtaaaaattatataccgtattagacataaaaattattagattttaaccttcttttcatagtacatctttgaaatgtacctattttacatatataccagtgaattacgtcactaaactttcaatgtcaaaataaaatgtagtcctaccaaaacaataaagctccagcagaaaaatatgaaatgcttcaatttttacatttaaattaatgaaagtaaattaaaaatttagtttcacgatcatactagccacgttacttatgctcatcatgtacatgtagcttcttcatttaaatttaaattacatttaaaattcaagcctctctttgcactagtcacattttaagtgatcagtagtgagctttagagtatatagccaattcttgactgttcctctgtcatttttttacattgatttcaatgaaataagtacactgataagtttatgaatgtatattttcccatgttttggattactttcttaaagtagactctcagaagtagaattactgggtcaaagagtataatcaacccttcttcatcattgttaccatattgtttctttagttactagagaggaatatttctctacatatttatttactatgtatttctctttcaatggaatactttttaatgttatggtttatttatctattggtgtcctaatgtttgtttaatttttagtctacttttaaatttctttgtggactaaagatactaacgctttgtcttgtttttcctcatcttttgtttatttgtttgtttttttccttctgggagtaccaactgaaccctttacttttactatagcaaatatttagataatacttcctctgtaagcttcaaagtttttcccactctagaagtttgatatttacttctcttttatcatagattttctatgtatttttaaaaaatgtttttatcaaactggaatatatgattatgtaattgtgagaaaataaactaaattacaagttcttaaccttcagttgaatccagtgcttacccattatttttagataaagcctcattatatatagttgctgaccaccactgcatagttttacgcatatgtgtagttaatcaggaagtagatggacccaaatagattaaaatctactgtttcaaatatttcaaaataatatcatatattcttccctattatattctgatcagaatattgttctcagtaaaaacaaagtcttttttttttctatatcaccatgtatccacagttgattaattatagtcatggttattttacataggtttatttccttttgaattaatatagacttatacttccaagagttataaataactgaaatttacatagttgtgtatgcacacatacacatacacatacccctattcctcacataattggtaatagaaataatgaaaagaggttgtgttcttaggcaaggacaatttaaaagaaccccaaatgattaccttgaattaaggtaaacactggtaaaaaaaaaaagagcaaaaagggcaattttttcctttagtatattaaacaatgttgtttctaacattccctcacgtttagactactctgaaaaatccttagagtggttgtgtaatgtgtttaagttttttcgatttccaagcattaagtctggctccactaaaacggttgtttggttctattttagtctgtccctatctgtcctactgctaccactttgtgttgttttgttttctgttataatgaatacaacagtcccacttcattctcagttctaattaacgttatccagcctctaagtgttagcatctactttgcttttggttataggatcaacgataaacagctaactgttgtgcagactgaaatccctaattagtaaagcacaagattttattggttatatatttttctaaactatagacttgattttgttgcaaaccttacatgtagaaaaaaaattttgtaatggcactgtttttatttttggtgatactatagtctggaacatgtggcccagcaaaggttataaatctagcaagaaaaattatggatggcatcaattttaacagtctttgcgatctaacagagcataaaccccaaattgtttaaatactaaatatttacttaaagaaaaacaagagatcattcaaaaatagaatttaaatagtgaatttgccttttatttaaaagttgacaagttttgtatatttataaaattaacaaaattgacatcatactatccatatcacaagactcttgtgttgtattttaaaggaaaacacacacacagcatacatacatttggattggggccagatttagactccaggggcacagtgttctgtaccttaaattacaatcagatgtattttagcacagatcaaattttcagtctgaagttggtgagaagcctaattatttgaccaggttactatttatgtagaccattctgtggctggctgtggttaatccacagctggcagaatgctagctatgggaggtttttatttgatgctggaacagtttggggagaaatagagggggaaagctttaaaatcttctcattaaatgaaagactaaaaagcaagacagtacatccatattactatggagacaagatgctgtataaactgttcgttttaattctccaagtgacagaaatagcaaagcagcagcttggatgctcatagtttgcaagtgataggatacttggttaaaaaagaaagataaaaacatttaaaaataataactaagactaagatttgttgcctcttagaacacttgaatattggtaaagaattaatggattcaatttttaaatgatgagaaatattgttattatacaaaaacattttgtatttcactaaacatactaaaacatttagaatttcactagcagtactttaaagtgataagaggcagttgtaggggagaaaaagtaacatattttcctcatccatcgcaagggtcatgactgaaccctctgtaacgaaacagattaacaagagaaaagcataatttatttaacaaagttttacatgacacaggagccttcagaaattaagacccaaagaccagcaaaaactgtatttttatgcgaagtctgatgaaagacatggatagttgtagagaaacattagacaaaaggggtatgatctaatggtaataaacctagggttgaaggatgtggaagccagcaagtcctgtctgttagattattcttggccaccaggtataggacaggacccctttggaaaagggttttatggccagctttcacacagaaaggtgggagaaggtcagagtgaccttgcttctgcgggttttctcaattgctagggggccatattttggggtattgtattctgggccctgacacaattatagtagacgattctctcttaacgtctcagaatatgtataaaggcaataaacccttccttaaaagatggaccccaatacacatggctcctgccactaaattaatttttttagtcttcttattgtagtctatttgaaatttgaaagtaatattttaaaagatttttttttctttttaaacttttcagagtttgcattatggaaatcgttggtccctcagttataagtgaatatctcagtagcatttttgtaacttttaacagaagtttcttttatattttcaaggttatttcttccatttataagccagttcttctccccttctagtttccagtgctcccacttcctctagttctttgctctaattatcctctctcccttgcctcttcattcttctatttctccaatagatccttttctttgaaaagcaaaatctttccaactttccctgcccttaaaagcaaatctcttctttcctcccttccctgcccacccttccccgcaaaaaagcgtttgtgccttttcctcctcttattatctgctcaaattagcaacatatctggagtcatatgaatccaggcttcatcacatgtaagctgtgtgtcctaagaaacatctcttaacttctctatcttgctttatttatcaaaagaaactaatatgtccacctcataggtttgatgtaaggaaaaaacaataactgagttgctgtatagtatagtgcctgggacacaataattactcattacatttcagatggttttattatcattactgatgaagctttgaaaataattattcttaccttactttctcaccattccttttttaacaactacttctaccatcatactaagtgctttctgttaatcatcaaatcttatgacttttactcattcctttctttctctacttccccatagcaccttcttaaaatttcccttgcttagtttctccaccatcacttctcctctcctcatttggcctcctcttgttttctccttttccttttttatttcctctaatttttgttctccattttttccttcgtcgtcttttgttctgtgttctctgccttgggaattacaccacctctttgacctcacctctttcatgacctttcctctaagtccaactttctggtagatacttagagatcccttagaacctcaactgtagtatgaccacaactaaacactctttaccatctaagccagatcttattctggaattttccacttttattaatggtagaaccagattcaaaaatctcaatcatcttttgactcttttcttctttgccttccacatcttaaacaattgccaagtcctgtatgtagtactcctaatatggttttcttttacacagccaaatgtagacatttattaactgttgctgaattgttgctgcccaggttaactttgctttaaattttcccataagcttgttattccttcctttcacggaaatattcattacccatgatccacccctacccctcttgcacattgcccaccaaatagattcctaccctgccatccaaggccctttgtattcttaacttcgccgaccttttcaagtctctattattgccctttgtgtattcctttacttgtttgtgcaccatccaaactaatttcctgtatatacatgtatgtctttgcttatgctttcctctagaaagcatgaatatgttttaataagactttcattaatattaaagctgtacataaatagcattttaaatgcagctttcctgacatgaaattttaaagaaatttaaagaaaattttaaagaaaaattaaatatttttcttttgcattactgcattcttttctcattatttgaaaattctaattcagaatcttcctcaaaaatcaatttagatatttcttaaggtaacaagttatgattgattgattgattgatatagagacaaggtctccgtgtatttcccaggctggagtgcagtggtgtcatctcggctcacttcaacctccaccacctgggctatagcaatcctcccgtctcagtctcatgagtagctgggaccacaggcacacaccaacacacccagctaatttttgaaatttttgtagagacagagttccgccatgttgcccaagctggtttggaactcctagactcaagtgattggcccaccttggcctcccaaagtgctggaattccaggtgtgattcattgtacccagccagaagttatgatcttaattaacagattattttaaagtcacttataagaatacaaactcagccaggctcagtggtgtgcacctgtaatcccagctacttggagggctgaggtaggaggattgctttatcccaggagttcaggaccagcctgggcaatatagtgaaaccttatctcaaaaaatatatattccaaactgtttgtaagaagctaaaaggattcagtttgccttcatagtacaatttccctaattcgaatgtaattattgtcttgaatgagacctttcaaacattttttctttcatgaatttccagaattctttagtattgagcatataaacctagtatgaaataagtaatgctttattctctgaagtaatggcatgtatcaagcatatggtactcatatgatcaaatatccttccagtcaaatgttgctattttctgccttgcatcttataattgtattttatatacttttgtattttgtataggtttcttttattctcactgagagtgactgtggagatggtatttctaattttccctccttttttcttcatccagggcttttttcttacagtttccccagagtcagtattaaaggtggctcaccatgcttctgaaaacaacaggattttcactttgaatctatctgcaccgtttattagccagttctacaaggaatcattgatgaaagttatgccttatgttgatatactttttggaaatgagacagtgagttacctttcctttttcaaaagaacctgggggttttttgtttgtttatttctgatgtgtgtatatatgtttagaaatatataaattaaatcctaaatttttgtgtaaatgtccttgagaattgtgcaacaaaattgcctcaatgtcaactgctctcagtattttcaatatttccttcagtatatactaacttctttcttagtgaagcatttatttatttatttttatatttttatttttttgaggtggagtttccctcttttcatccaggctggagtataatggcatgatcttggctcactacaacctctccttcccgggttcaagcagttctcctgcctcagcctcctaagtagctggggttataggcgcatgccaccatgcccagctaaattttgtgtttttagtagagacagggtttcaccatgttggccaggctggtcacgaactcctgacctcaggtgatctgatcgcctcagcctcccaaagtgctaggattacaggtatgagccactgtgcccggcccaacatttatttttttaaggtgtttgacgtttgatttacttatagtaagagtcatcctttttactgtaatttctgtgagtttttacagatggatacctgtcctgttactatgaccacaatcaggataaaaaagcacattcatcacttttttaagtctcttcagagtctaagtccatttgatatttgtttaataaattatgagtaaattttgatatattacatttatatttctttattaataatatttttaaaatattgtctgttatagttgaaggtgataaaatggaatttcatctcaacaagtacagttttttctttctaccaagaatgtattttcttccattctaaattatggaaatgcttatttacttaaatgcttatttactttgattgcttgtttactgtttatacctcttatttactgtttatacctctttaaaaatccatgaaagaggaaaaaatccttcagtgtgtcttcctatgacttggccatgtcacttgatggtttaatgtatacaatgaaggtattgtattaatcatcccagaagttcattctgattctaattccatagttctaacatagtttgaatatattcatcaattttatatctaataactgccatctgcctagaataacataaaaattgacctggaagtttacgagatcacctgggtaaagattaaaggatgatccatagaaataatatcacagtgtatctgcaaaggtgatggttacattggttataaatggtgacattggaaggaaatgctatattcttgataattcacaaattgagatactggcaagaaatagtggtaatagccaagtgccatataactgctagaagcctaatttgactaagatctaccatttagtttttccttattaacagttttattttgtaaagggtaaaagaagtaaatgggaaaagtgctattcaagccttttgaataacattaaagcattggtctcagtagtcttgagaatcattgggagaagttaacatttggtctcagagttctaaatagtcaagaaagatcagactggcagcacttaaataagttctctagagtttaagagacaaatcttaaaacttttaaaaaagataaatatgattccaaagaggccgggcacggtggctcacgcctgtgatcccagcactttgggaggcagaggcgggtggatcacgaggtcaggagattgagaccatcctggctaacacggtgaaagcccgtctctacttaaaatacaaaaaatgagccaggcgtggtggcgagtgcctgtagtcccagctactcgggaggctgagacaggagaatggcgtgaacccaggaggcggagcttgcagtgagccgagatcgcgccactgcactccagcctggacagagcgagactccgtctcaaaaaacaaacaaacaaaaaaaaaaaaacataaatatgattccaaagaatgaaactttggaagtaaagaaagcttagggagattgaatgccataaaaaatgctatttggactttatagtcacaaatgatcttaattaaggagagaatgtggagggaccttttgaaaaaatatagcagagcacgcagaaaactctttaataagagctcaaatttggaggataacgagatagctgcctctgcctttgccggtgcagtgagagcagcttcaggaatcttatggcctctgaatattttggcatcttcagcctaccaaaactgtgtcaaaaatgcctctcttatttctgcattgtccactggacgttttagtcatattcagacaccagttgtttcctccactcccagacttaccacatctgagagaaacctgacatgtgggcatacttcagcgatccttaatagagtggccctcttgcttccaagtgtcttgaagctgccagccagatctctaacatacgtcagtacaggaaaaggcaagagaaggattgtgaaagctgtcatctataggtttcttcgacttcattgtggcctttggatgagaagggctggttataagaaaaaattatggaaaaaggcacctgcaagaaaaaagcgattgagggaatttgtattcggcaataaaacccagagtaaactcttaagataaaatgacgacgtccttctggaagaggtgaaactggtatgtccatgatccttatcagaagtgtcatgatcgaacaaacctgaaagtatagatcagaagtttcacttgtttctcagttattgaatatgtatctttgtgtacatatctgcaaaaatggataagtaaaaatctcgatgtaaattgtatcaatgaatatgtaaacatacagtgacaacactgaacttataaaagttttaaaacttaaaaaaaaagctcaaatttgtaaaagacatgtaaaaagaaggtggaaaatgtatttagaatcagggaatgatgctaaaagtttggtagagacaaaagagaaaagaaagtcccaaaagtggtttaagtttgcagcagatgctgatgatatcaaaacaatcttcacttaaaaaaaaaaaaaagactccaaagtacaagcaacaaatggaaaaaatagataaattagacatcatcaaaattaacaatttttgggcatcgaaggacactaacaagaatgtgaaaagacaactagtggaatgggagttaatatttgcaaatcatatatctgataaaggattcatattcagaatatttaacacagtaacaactcaacaataagcaaactaacaacataattcaataatgatcaaaggaatttaataaacatttattcgaagaagatatacagatggccagtaaacacatgaaaagatgctcaacataaccattcaagaagtgcaaatcaaaaccaaaattagataccacttcacacccatcagaatgacaattgttttaaaaaatggaaattaacaagtattggtgaagatgtggagaaattggaaacacttgtgtattgctggtgggaatgtaaaatgggaatgtagaagacaatttggtggttcctcaaaatgttaaacatagaattattaccatatgatctagcagttctacttctaggtatattacccaaaataactgaaagcagggactcagataattgtacaccaatgtccatagcagcattattcacaatagctaagatagaagcaaatcaaatattcatcaacagatgaataaacaaaatttcatgtatatatacaatggagtattatttagccttaaataaaattttgatacatgctacaacatgaatgaattttggaaatactatgttaagtaaaataagccagacacatcagacaattattggattttctaagaagaattccacttacaagaagtatctagaataggcaaattcatagagacacatagtaggatagtgattacctgggagtggggtggggaggaatgaggcattattgtgtaataagtacagagcttctgtttgggatgatgaaaaagttctggaaatggatagtggtgatagttgcgccacactgtgaatgtatttagtgccaatgaattgcatacttaaaatggaaaattttatcatatgtatagtttaccacaatttttttgaaaaagttttattctacaaatcagtaaacttaaaagttggatcacagcttagcatagattattaaaggaattatttttccccacctagaagaggaagtggtaaaactgtaagctgctacgtggctgtaagtcatggggcaagaaaatcttttctcttttggtatgattattgttcatttgaattcgcttcaagaggtatttatatagtacctaagtacctattatggcagaccaataagcagtggatacatagtatattttagaacatctgtcattacgtggactatagaataataaagattggctataagacaattagaggtatttggtattttattgaagcagtctcaaaaggtctgttgataaataaattgatttctaggggtacgcctcagtgtttaccctgcctttgcttaagtaaacagtgatttagataaagctatatttgcatataattcaaatgcaaataatacaacaccttaatacatactaggtaagttgaaggtcaaaatcagatttttttaaatgttagtagactctaaatatcagttgagtgatgaaatttaatagggataataaaaattatatcgtatttgattataaaaagcaagtagagtaaaatgctttatccctttaatctcatcatccattgtttttctccttgaatactatagtgataatgttatcttcagttttccaggaaaaaagagacattttacttctaaaatgtgacgaaggataaaatatagttatcagagaatatacgtaggattctttaatatttcccccctcaaaaaaataaagtatactgtgtttagtataaatttttaaaatgtcaaaactcagctaaaatcaaacacacttggcccttattttctacatgtcaccttcctcttgtcagaggattgtacagtagtaatgatgatttaaaacttctgatagcctcaatatttaaaaaaaataataccttgtccacaaagattatttcttcacaggcaatgatcaatgatccctgtgagacaagaaataaataagataaacctgatgattaccccagctaactccttggagataatttccaggcaacagaagaaaggtaactaaggccaagcacagtggctcacgcctgtaataccagcactttgggaggctgaagcgagtggatcctttgaggtcaggagttcaagaccagcctggccaacatggtgaaaccccctctctactaaaaatacaaaaaagcctggcagggtggttgtgcgcctgtaatcccagctactcgggtggctgaggcatgagaattacttgaacctgggaagcagaggttgcagcgagccaaaattgcaccactgcactccagccagtgtgattgagactctgtctcaaaaagaaaaaagaagggtatctcaagtagacccttgcagtctcttttaatgaggagttggagccggaagttcaaggagtctaagacagctagtgtttgtaagttaaaagtaccagagaagaaatagctgaatagagggagaacacaggacatttgcagaatcccaacaagtcttcagctgagtatgaatcagtgcatttttgtgaagaaattaaggaagaccacaaaaagaaccacctaaaaagattgtagaagacaatcctcagtgcacacatgaggacctataaccattcctatcctactagtcagagtggataacctcgtaattcacgaggcttcaagtagagtattaaaaggaattttgtctcattagcaggttaaaatcagctctagactagatgttctggtccctcctgtcaatattattacaatatatttgacaacctttatgaaatggacaaatttgttaaaagacacaaagtactaaatcatactcaagaagaaatagaaaaagtctgtttagattattaaagaaattgaatttgtagttaaaacccttgctacaaagaaacttcaaaggctgaattgcttcagtgtttaattcttttctgtttgtttgtttgtttgttttgagacaaggtctcactctctcacccaggctataatacaatggcacaatcatgtctcactgcaagctcaaactcctgggttcaaatgatcctcctacctcaacctcccgagaagctaggacgacaggtgcaaaccaccacagctggctaatttttaatttttgtagagaggaggtctcgttttgttgcccaggctggtttcaacctcctgcactgaagcgagtccttctacctcagcctcccaaagtgctgggattacaagcatgagccactgcacttggcagtgttgaattttaacacagatttcagaaagatgtagtaccaattgtatacaaactgtcccagaaaattgaagagggagaaatatacctatcttatttcatgaggtcagcattaccttcataccaaaaacaaagtattgcaagaaaactacagaccaatatccctcataaacacagatgtaaaaattcttcaaataattttagcacatcaaaccgaacaatatattaaaagagtaattcatcatgactaggagtgtagaattggtttagcattttgaaatccatcaatgtaattaaatatgttaagactaaaaagaaaaatcacatgattatcctaaaagcttttgaaaaatccagacatctatttctgttaaaagccctcggaggctgggcatggtggctcatgcctgcaatcccaatagggattggtgagggtcaggagtttgagaccagcctggccaacattgcaaaacctcatctctactaataatacacaaaatagcagggcatgttggtgggcacctgtaattccagctacttgggaggctgaggcaggagaatcgcttgaactggggaggcagaggttgcagtgagccaagatcatgccaccacacgccagcctgggcaacagggtgaaactgtgtcaaaaaaaaaaaaaaaacccttggaatagtagaagcatgaaaaaatccagatttagaaagaaggaagtaaaactgtctctattatcaaaagcatgatcatcttcatacaaaatctgatgtcatcttcaaaaagctattagaactggctgggcatagtgcatcacgcctgtaatcccagcactttgggaggccgaggctggtggatcatttgaggtcaagagttctagaccagtgtggccaacatggcaaaaccgcgtctctactaaaaatacaaaaattagctgggcatggtggcacacgcctgtaattccagctacttgggaggctgaggcaggagaacccgggaggctgacctgaggcaggagaacccaggaggcggaggttgcgatgagccgagatcatgccactgcactccagtctgggcgacagagcaagactctgtctcaaaaaaaaaaaaaaaaaaaaagctattagaactaagtgacgtagcaagattgtagcatacagaataaaaaatttaaatctcaaatgtatttttctatattagcaagaaacaaccagaaatttaaaaatacgatttccaataccatcaaaaagtataacaaagtatttactttgggataaaccagaccaaagatgtatacactgaacactacaaaacattgttgaaaaaatttaagaagacccaaatgggagatatatcatgttcatagattagaagactctgtattgttaaatataaattctactcaaaataatctatagtttagtgtaattcagtcagaatttcagaagttttttttaaagtcaagttgattctaatatttatatggaaaagcactggactagagtagccaaaccaacgtggattttaaaaaccaaatcagaagacctttacatgatttgaagacttattacaaagctacagtaatccagacaatgtggcattggtgtaatgatagacaaatagtcaatggaacagaagggaacgtccagaaatagacctaaatttatttttcaacaatgtttcagaggctttttcatggaggaagaaaacagtctttttgacaagtcgttctggagcaattaaatatccatatctaaaaacgcaaacttcaacccacgtaacaaacaactgcacggctattagaatgtctgaaagtgtgaccataccaaatattggtaaggatatatggagcagctagaatgtaaaatggtacaactactttggagaatggtgttcttgtttcttacaaagttaaatatacatcctccaaatgacctagctatcccactcctagatattcacccaggacagatgaaagcatctgtccatgtaaagacatacacaggtgtttatagcagctttatttgtaatggccaaagtctggaaaacaaaccaaacatccacaactagtaactggttaaacaaattgtgatatttccatagaatagaatactactcaactataaaagaattgtactattgataagaaatgaaccaacagcatagaagaattttagaatacctatgctgagtgtaagatactgtaaagtacattctatatgattctatttatattctagaaagtgctaacaaatttatggtgatggcagatccattgttgtctggggacagggttatgctatgaggcagtgatcacaaacgggcatgaggaaacttttaggagtaatagatgtgttcccattgaggttgtggttgcagtactttatacatacgtcaagttttatctaattaaacacttttagtttgtgcagataattgtatgtcagttatacctcagtaaagctattaaaatgaatatatactttgattccatttatatgtttaaaagtaggaaacattattctaaagccattaagttccaaaaatacactgctaaaatgaagaagtgccaatttgttattttttgatcaccatatatgaaacttctgttatttccatggaagatccccttatatttaagtagcaatgtcaagccagaggaagagtgttttgatagtcctgggttctaatcatgacaactaaaaattatcataacctaccattgaataatgctttaaagttaaaaagggtattcacaaaaaccgtcatttaatctacaaggcaattccatgtgtttttctaatgcatgtaaagtttcagcttggctcatggaatatattctcaatttttgttaggtaatgttggtagtagttttaggagtattgatcatgttatctattaagtttcacttcactttaacttgctttgataactcacactcttcattcattcctgttaaaacataatgaatatagtaccaagtgcatgagggaaaactcacagctattgggctgctctctgctataccaccttacttctgttccaacaaagttatttgcttacaaaagttaattatgtttttcctaaacttggtgaaatttgtgttcattatttaattatttaacattatatattctgatgaaatatgaatgcaagtagaatgagaattagtttaatgagttaaggttggttccaaaactaaatacatatgagttatttttaatgttgctattgaattggatgtgggcatgaaaagtataaaagattaaaggcagtaaaaagctgtaaacatctgtattcaggagtgcttcataggtgtttttatgttttctctctgctttaaagaagttgaaactaggccaggaaccatagcgcacacctgtaatcctagcactttgggaggttgaagtgggaggattgcttgagcagaggtgttggaaaccagcctgggcaacatagttggaccccatctctccaattattttcttaaaattagccaggcatggtggcacacacttgtattcccagctattcgggaggctaaggtgggaggatcgcttgcacctgggaggttgaggctgcagtgagctacgatcatgcaactgcactccggtctgggtaacagagtaagaccctgtctaaaaataaaatttttaagaaagtaaaatgagaattcataaactatgaattctagatgtggttctacaagaaaaactctagaatgtcagtctgtaggcatgctcaaaggttttgaccctatttttttttttttttttttgagacagagtcttgctcttattgcctaggctggagtgcagtggcaccatcacagctcactgcaacctccacttcccaggttcaagcaattctcgtgtctcagcttcccgagtagctgagactacaggcgtgcacaaccatgcctggctaatttttgtatttttagtagagatggggttttgccatgttggccaggctgattttgaactcctggcctcaagtgattttgaactgcccacctctgcctcccaaagtgctgagattacaggtgtgagccccccacccagctgaccctattttaaatattagcaaatgatgtatctttatatattaaaataaaatgtttagattatgaaagctattttttgttcccttaatttaatcatcactctgatttatttatcaactactattccttttcctcatctgtaaattgaggggatttgcatagaaatactagataatcttttaaattttttcttaaagcttaaacatgttataaaactgatgattcattttttttccacattctaagattaatactgttagattttattataaattaataaagttcctcttttaacatgtaaaataatgcctgacatttcttttaggtagttctgattttttattatgagtgtagccttaactgtagtgcctttgaagctgaattctccccatttgtgaccccagtattccttttttgtttagtgaacctaggggaaatgatatttctctccaaaaaatacctgaaaatatttggttagacacgtgctgggacaaaaagtgaagtatccacagtaataccattgctatgttcttgtgatataaccagattataattactaaatgatacaatttactttctttttttaattctggtaaaaaaaaaatacacaatataaaatttagaccattttaactatttttaagtgtacaaatcagtggcattaagtacatttgcaatgttgtacagccatcaccactattcctctccagaactttttttttttttaatcaacccaagcagaagctctgtacccattaaacaataactcactatttcctgtttcctccttcctcctcacccttggtaactgttttactgtctatctatgaatttgcctattttaggtacctcatacaagtaggatcatacaaaagttgtctgacttaatttcacttagcataatctttttaaacttcatccatgttatagcatgttatcagaatttcatcttttttaaggctgaataatatttcattgtatgtgtgaaattttgttttttgcttcattttgttgatagacatttaatttgtttccacctttgattattatgaacaatgctactgtgaatgttaatgaacaagtatctgtttgagttcctgcttttaactcttttggatatatacctagatgtggaactgttggatccacaacaggtacaccattttacattcctaccatcaatacacaagggttccaatttctccacctcctcaccaacacttattttgcatttaaaaaataatagccatcctgctgggcacgaggtggcatctcactttggttttgatttgtgtggtttactttcagccaaggttcagaaatacatagtgacaaatttctgtttctttaatttaaaatctttggtaacctgttacattgcattttgtacttttaaattacacatctgaattgattggttatccttgttaaagtagttccaaaattactgtagtttaaaaactctttaaatattacattgtagttttaatttgtttctgacatcttcaaagtttgaaattttcccttcagcaacaaccatttgttagctacattcacacgaaagcagcttaataaaggacattctacacaaaggtaattataatccattgatgccccttaatgcaagctgctttgtagtcattatctagcagtagatgactaaagaacttgattattcttgtttttcatttttattaaattaagaaggtttttttaaattatgtcattttgcaaatggttcttaggagtaatgcctttcaaggctccataatcactagataattaacctgcaaggattaagtacactcaactttgcctcaggatgcttaactctcaaatacagtcaattatctcatgataataactgctttgtcaagagttaccacttaactccacagtgaaaagtcaaatcacccataccatgcactttaagatagtttcaataataaaataacagtttgaaatggggcagaagaattcagttaaattttttcatagggataagaatgatatgctttagataaagctccccctcatatctagtattttgaatttcacaaatgacttcaatttataaagataatataggccaggtgcagtggctcatgcctgtaatcccagcactttgggagaccaaggtgggcagatcacctgaggtcaggagttccagaacagcctggccaacatggtgaaaccccatctctaataaacacaaaaattagctgggtgtggtggcacgcgcctatagtcccagctgctcaggaggctgaggcaggagaatcctgagaaccctggaggcggaggttgcagctagccaagatcacaccactgccctccagcctggcaacagagcgagactccgtctcacaaaaaaaaaaaaaaaggtaatgtattgctctgcttcatcagtccttttgctggcagtgttcctgcattgcaaattttcttataggaaagccattttgtctgttaacctcacagaggattcaatatattaaaaatctctaatatacaccaagaaaatggaaattactttctttacatattgatttaacttttaaaaaatctcgtttatcaacaaacgaattacaaaacagtgagcaaaattctgcagtttgttgtggttgttttttgttgttgagtagcttcactcatatttggacaggatatgccaaaaacagaaagactgctagatagatcaggacattttgaaagaaaatataaaaatgtctttaggtttgttatccatgtcctctaagcctgaatgatgcttgtatctctttataagtaaactatcattatctttttactaaaccagatgggatacattggctttttcttctgttatatattttactgccatggggatgggaagagactttattgatattttgtttacacttttaaaccctttttaatgtttctaatagttaattaataatttgaaaccatcaattctttaaattgtaaataactttgatacaggttatcttatttttcagtttctatacttctgtaaaatagaagtcatttgctcttttaagataaaaaatctgtgtgaatctatgtgtaattatgtacaccaaatagtgctatacatgcatacaacttctttcagatattcttcttttggttaagagcctttttttctttgtaaaggtattattttaatttttagaactatttttctgtgcactggagcacatgtttgggaggaaaaaagaaactttctgtcaagtccctatacacagagaattcttgtttgaatttttaaaaaattttgtcaagtctagttcttttatttatttatttattatcagttagagacagggtctcactgtgttgtccaggctgttctcaaactcctggcctcaagcagtcttcccgccttggcctccctaaggttctgggattacaggcatgagcgaccaagcctggccaagtctaattctttaaaggatgtgatttccaagtatttccaggaattcaagactgttacctagatccgtattctgacaaaagagatgatcttttctttcttcatatcagaatatttcccccatgaattgagggaaatggggctgtatctaaaaatggtaactctgccctttaaagtatacagaagtgccctgtttcttcctaagagaggtggaagtcccctttctgagactgtgcatatagatctctttattcccctttttctgctataagtgataagaggggctatgtagacaaaatgtaaggttgttataaaatcatcaaggaattgggaaagaaactttatcggaggatatacataaccccttcagaaaaaaaaacaaaaacttatggtgctttttggaagaaattctgacatagttgtattttctgagaaggataatgaaatttcagttaacatggaactgtaacttcgtaaaattgctgctcagctcctagatttaactttctccctagggtttttctaatatatttactcatctgaaaaaagtgagattgactgtagcacaagggagacttctgatgtcagtggcatgttgtaaagatgtgctatgggaaagattcagaaaatgcaaaggctatttaactatatgctctgcatctctcttcctttctacatagctctctcctttctttcttactccttcgtctccctctttacgccaactacattgcctctctgaagatgaaatgcttttaaatcatccccaatctaacatccatcactggtaaaaagccatctaattattatgtgttgatttttaaaaattaaaaaaaattattagaaaattaagaagagcatttaaatgtttttaattgcaaggagaaaataaatacactcaagtaaagaaaaacactgtgtaatttgaaatagtttgaattactacggagataatcatattttatgcagtaatgcctttctattttattcactatttctattaatctttatttgtttcagttactgtactataaatttgtaagtgattattttggtattatttgtatagtatgccataatataaaaataatgaaaaatattaaatatatatttaatgttcttatttaatgcctttaattttttttttctttgagacaaggtctcactctgttacccaggctggagtacagtgatgcaatctcggctcactgcaaactccacctcccaggttcaagcgattctcaagtctcagctttccacatagctgggattacaggaatgcgccatcacactcagctaatgtttgtatttttagtagagatggggttttgccatgttggccaggctgatcttgaactccaggcctcaagtgatccacctgcctcggcctcccatgtgctggggttacaggagtgagacacctcacccagccaaaaattattgtttattaaaaatcatttaatgacattgacatccttataaataaaaactgtaaatttatatcacagtagaaaaagtgctagacctaaatttagaaaacctgtcttttatcctagctcttgagtttttcacagagaaaataggagtcaagaagccaaaattctgacatgagggaaataattagcaaaatttaaataggtgccattgattagtcaatggtattttatcaacattaatttttattttattatttatttatttattttgatatggagtcttgctctgttgcccagactggagtgcagtggcatcatctcggctcactgcaacctccaccttccgggttcaagcaattctcctgcctcagcctcctgagtagctggggttacaagttcctgccaccatgcctggctaatttttgtattactagtagagacggggtttcgccatgttggccatgctggtctcgaactcctgacctcaggtgattggcctgccttggcctcgcaaagtgctgggattacaggcatgagtcaccgcacccagcttaacattaatttttttagttttggtaattttaatatggctatatagaatgtttacatttggaaaaatcctaatatcctttttgactgatccagatccagtccaggttgctcacattgcatttagttaccacatttccttcgtctctttaatctagaatggttcttcagtctttgtctttatgaccatgacaattttgaagagtcctgactggttttttgtagaatgcccttcagtgtggagtttcctcatgattaatacattttttataggaataccatagaaacagcctgggcaacatagcaagatgctgtctctacaaaaagtaaaattcaccaggcatgatggcacattcctgtagtcccaactacttgggaggctgaggcaggaggattgcttgagcccaggagtttgaggctgcattgagccatgattgccaccctggactccagcctgggttacagaacgagaacccccacacaccccccccccctaaaaaaaaacaacacaacacagaaatgctattgtgtcttttttcatgcgttatactaagattttagtgtgtttcgttactggtaatactaactttgatcacatggttaagaaaatgttggcccagtttattcacttcaaagttactatttctggccaggcatagtggcttacgcctgtaatcccagcactctggggagccaaggaggacagatcgcttgggcttaggagttcaagaccagcctgggcaacatggtataaccctatctgtactaaaaatataaaaattagctgggcatagtggcatgcacctgtagtcccagctacttgggaggctgaggtaagaggatcgcttgagcccaggaggtcacatggtgaccttggaagcaaatgctccctcaaacacgagatgactgcagccctggtctacatctcagttgcagtcttgtgaaatcttgagtcagaggcactcagctaagccatgcctggattccttttcctggaaactatggagataataagtgtttgttattttaagtcactaagttttggagcaatttgttacacaataataactaatatgctgtgaaaaacaaatttactaagagctcaatatctgtgtacaattttttttgtctttagccttttgtgtatattgtcaaaacacaggcttttagttaaagttagttcctttccccttcaagtattttaattttttttaaatatgtgaaacatttatatggttcttaacatcagaactatatgaaaaggtttactcagtagtgtcgctcctcccttatccctcatcttcctcattccccattctgtctctattcctaccctgtttcttcctacctaccctctataaataatctcattagtttctggctcacatttctaaatttcttttagcacaaattagcagctaaatgcatattttactgtatcttctttgttacatgaaaggtagcacactatagatagatcctctttgaacttagctttttttcaatcaagtgcatcttagaaatcattccataaaagctcatagagatccttctcatttttaattttattttagttatttatttatttatttatttatttttttaatgagatggagtctcgctctgtcacccaggctggagtgcagtggtgcgatctcggctcacagcaacttccacttcccgggttcaagggattctcctgcctcagcctcccaagtagctgggactacaggtgcctgccaccacccacggttaattttttgtatttttagtaaagacggggtttcaccatgttagccaggctggtcttgatctcctgtcctcgtgatcctcccgccttggcctcccaaagtgctgggattacaggcgtgagccacagcgcctggcctatttcatttaaaaaaaaaaaaaaaactgagacagggtctcactgtgttgcccaggctggtcttgaactcctgggctcaagcaatcctcctgcaatccttctgccttgacctcccaaagtgctggtattacagacatccagccacaataatcctcatttttttagttggattttccccattgtgtgaatgtaccatattttacccagtcactctcttatgtatggacattaagactgtttccagagtcttgcacttaaaaacaatctttcaatgaataatcttgttcatacatatttcttgggttgctagaggtatttcttcagagtaaattccttgaaatggaattgttgggtcaaaggataagtgcatataacgttttgttagatgttgctaaattcctctccaaaataattagaaatgttttcattctcagcagtagtgtaggtgaatgcctgtttttaatggggttattttaatatttggttatcaattattaagcattgctatcaaatggaattcactagaagcatgtaaaattctagctttatttcaaatacttagttgaaccagccaattcattttagcacagtaaaagtaatccaagaactaaaaagtgatcattctttaaggtacagattttaaagactcttttatcttttttttttcttttttttgctattttatcagacacattagaggaatatgaattaatccccattatacactctttagtttcattttctggccctgtattttcatcttatacttctctcctacaagcacctcttcctttctcctgtactgcctaactattcatgttttcttatcatcaatactcatttcatatattccctacctcacattctccccttctttccctcccttctccactcccattcagttggttattttataaatgtgattctgtgatcttgtgtatataattacaatgcttacatgtttcttttacactagaatgtgttcctttacagcagtgactttcattcttcactacattctggccacttgattggtgatcactttctgaccggaagttccaattatttaatcacaaagttggactttctggtgaccacttcccatcctggggctgacagtgagtcgccccatcagcataacaaaggcacttttaacaatcaggaaattctgagggtttttgaagctctgtgctaggaatccagacaaggacttgatatattttttactataccagtttaagggttaatgataccatgtaacaactttattaatagattactatttatagaaacttgataaatgtggtgggaggtggtgcagaatcatgtgatataatcaattataaatgaaagcacagataaaatttgaaataataagagagaaataagaatgaaggttggccacggtggctcacacttgtaatcccagcattttggggggctgaggcgggcagatcacgaggtcaggagatcgagaccatcctggccaacatggtgaaaccccttctccactaaaaatacaaacattagctgggcgtggtgatgcatgctactcgggaggctgaggcaggagaatcacttgaacccgggaggtggaggttgcggtgagctgagatggtaccactgcactccagcctggggacagagtgagattctgtctcaaaaaataatgaaaaccgaggagttttttctttctttctttttttttttttgagacggaatcttgccatgtcgccaggttaaaataaactttcaattctcttctcttgaatatctctcacccaacaatgtttttttcatgttgatcactttactaaagcgaacaattggggttttaccaaaattgtgaaggattttattcttccatacttatgtctgtgttcagggtcatacagattctactttttccttttagtttaaggtattctcttggagatttaatgtacttaaatttgaccacaatttattgagagcatattctgtgtcagacattgcactctgcactagatattcaggaatttctaaaaagaatgttaacattgctgttacatagtcagttactgatcacattcttttcctctcaacttttttcaaaataggaatctgcggtatgttttcacgtatggagttcaggtcaggcttaggggtccctgacaatgtgaatagttttaagctgggcctcaattcgtggtacccttatactaatttaacaagccgtggactctaggttccaccaaaaatattttgttccatcctctctggtttcagtccatggtgtacagaaagaaaactaaggaacttcagccccaaattgtcaaattttgctacttaagaaacagaagatttaaatctatcattttgtcttatattccagagttgactggttcctcctgtctttaacttcttgtccttgaagggtattctaattttcattcagaaatatgacttctcatagggtttgtgttagatattttcagggccagatggatatgatgttcccatttctgttttattgttaaactactattccttttgagctgtaatgaacaattcattctgagaggcaatatatgttttcagtaattgacttgaataaaagtaaatgttaaacatggagttactaagttaatacagtgggtattagtactaatttgttcaaattaagatagaattcttaatttgataaatagaattcttatattacagcatcagtccaattggattgatagtttgtagaaaggtaatttcttacatgaggaaagacaggttttctttctcttagcaaggtattaatgcaaaaatgacctcttcatttcctaccagcttccagaagggaaatgctggttaggaggtaaattcaatttactctacaagcaaacttcacatctgttatgctgaagtcagagtttatctttcttgttatgtggaacctagaaatataccatgaggaatactgaaaaataaactagcagaaattttgcgtgatgctgaggatttttagatggctgcaaaatgggtgaaagtaatataaacttaacaaagaatgttgtcacaactctctggaacttagtactgtttttcaactaacaaatggaagatttgtgagactaggtcgacttaatgtgatttcaatgcagtaattactgtgtggcatgggcatggtaagagataggccttttctagaaatattctcatctctgttttttttagttgctcttacttagatttatattaactcagcttcacattttcatttctttttattttattttaaacaatgagaaaaatactccacgatgtcactgatttagttatcagatttgctttatttctgtatataataggtaatgtgagtacaggaaatatatctgaaaaggttacttgtacctaaattttaagttagatcatttaaaaattacttataagtctcttgagtgttttatatagtagggcagatggaaaaacttatttgatattcatttttggtacctcttaggaaaataattgggaatgtattcagttggaaaaaatgttgagaagagtgttttatataatgattatttagtaaaacattaaaaataatttcttattctggaggtttatagacatcaaaattgacaaagattcatggattatacatttcatcaaggtacctttaagcgattttttaaaaaaaattctgactctaacaatgcatgctcattgtagagcgttaaaaatacaaaaacatgcaaaagaaaaaattaaaattaacatgtgtcatatcacccagcattaactactctataatttttcctgtgtttccttgtagggtttttcccacacatttttatttgtttttatcatatttatttttattccacacactttttattttgaaatgatttacaatctaggaaagaattataagaagagtacagagttctctcctactacacttttgagcattcttgctttttctctctttctgtctctctaaatatatgtgcttaaccatagtacatattcagatttttctagctgtcccaagaatgttctttctagtgattttgttttccaggatcatggatcatgcattgccttaacttgtcatgtttctttggtttccttaatctggagttccttgatctttctccttcatgccattgcatttataaagagtgttgtcaactgttctgtgtatgtaaattcttaaccaattgaaatagattttacatcatttttcccactttatatatatatatatatttatttatttatttatttatttatttttattttattatttttttttttttttggagacagagccttgctctgtcaccaggctggagtgcagtggtgcaatctcggctcactgcaacctccacctcctggattgaagtgattctcctgcctcagcctcccaagtagctgggaatacaggcgcgcaccaccatgcccagctaattttttgttttgttttgttttgttttgagacagagttttgctcttgttacccaggctaagagtgcaatagcgccatcttggcccaccacaacctccacctcctggattgaagcaattctcctgcctcagcctcccgaatagctgggattacaggcatgtgccacaacatccggctaattttgtatttttggtagagacagggtttctccatgttagtcaggctggtcttgaactcccaacctcaggtgatctccctgcctcagcctcccaaagtgctgggattacaggcgtgagccaccgcgcccggcctaatttttgtatttttagcagagactgggtttcatcatgttggccatgacggtctcgatctcctgaccttgtgatccacctgccttggcctcccaaagtgctgggattacaggcgtgagtcaccacacctggccacttaatatattttcaacattttccaatgtctttaattatgtcaattataattttggattgctgtataatataatttattttcattagtcttctagtgttggaaatttttactgtttgttttcttttcagtattgcaaatacaattgggaaataaactttgtaaataaatctttgttgtaattttaatttctgaatctatcaagtatttgttaaaacataaagcaacaaaacaaaaatcctacagaagaggataattaaatgttaatctttttgattctgaatacaattagaatggaaatttggaaaaggggaaaattgccagataaagaggttgccagatttagcaaataaaaatacaggatgcccatttaaatttgaatttcagaagggacacacgatatctgggacatacttatactaaaaaattattcattgcatatctgaaacttaaatatgactgagcatcatgtattttatctggcaaccctaccagtggtttgagtattcgggaagacttcatggtagagataaagagagggaataaagaagatgttttacacaaaaggaatggttgagattacctccaaaacaagagtgaacatagtttatgtgaaatagtctccataaagataaagactttgtgtctcattcactgctgtatccccgatcccttaaacaatctgtacactgtagtcactcaataaatatttgttgaacgagtaaatgaatttgcactataaataaagccaggcaacttgggacaaagattacctgttgtaactaagtagataaagataaaatttccatgaaagtggaaaacctggcagaagaatttggacttcctgccttcccttatttattttataatgattcattaagtgactgttatgtgccacatgcacaggatactttggagaacaaaaacagacatggcttctaccctcatggattttatagtctgtattagaggcagacattcaatttataattcaattattcatttaatagtcaataaatttcaattcaattatagcgtacaacttataaaattgaatttttaatcattcaatttataaatatgagtactgtaagggaaaagtatataatacttacattctgaaatcacacacagtgagggggtattcttgaaagaacctgatcaagataaatgtacatggtgttgtgtcttagggatagatccaatcttttctttgaaatcttcattcattcactaattttccctcgaatttatagaacactctttggactattacacttatacatcttttaaaatctttttatatgtgcaatttagtttacttactagattgtaaattaattaatttatttatttatttagagacagggtctcactcacatcacccaggctggagtacagtggcacaatcaccactcagtggcagtctcaacttcccaggctcaggtgatcctcccaccttaacctcctgagtggcttggactacaggtgcacatcaccactcctgtcttatttttcatatcttgtgtagagatggggttttgccatgttgcccaggctggtttcaaactcctgggctcaagtgatccgcctacctcggcctcccaagatcctgggattacaggcataagccctgcacctggcctagatcgtaaattctttagtgagctgggggtatttcaatttgcttttatcccctattgtttcatgtatgtaaaatatacacaggcgttaattattgacatgttgattcattgaaattataatggggcttttaatagctatagatatgccatgagcacataaaagacgatttcctgattctttgaccctcttaaagaagtttatgatgcctacttgtcattcttgggtccttagaccttctgtggcaatattaggtcggggatagatgtctaatgatttgcagtcagggagctttgataaccattgtcacatgttagcataaatcagaacccaatcacttttttttttttttttgagatggagtctcattctgtcgcccaggctgcagtgcagtggcgtgatcttggctcactgcaacctctgcctcccgggttcaagtgattcttctgcctcagcctcccaagtagctgggatcacaggcatccaccaccatgcccagctaatttttgtattcttagtagagacagggtttcactgtgttggccaggctggtctcgaactcctgacctcaggcgatcctcccgcctcagcctcccaaagtactgggattacaggtacgagccaccacgtccagccgagaacccaatcacttttgactctgccttcaatatatattgcaaatctaactaccttttactacctctacttcttcccttctagttcatgatgccattatcacttgcccagattattacagtagtctcataattgctctccctgcctctggttttgcctctcccctccagcagtgataggaaataatggaagtttttaagtaagcatggtagtatcactggatctgttctttgacacagctggctagtagtgtttggtagattggaataggggcatagtaaatgtgggttgacatggtatagtaggtagtcaagacagtccaacaatcaatcttaaagacatttcattttcttggtagttaaagaatataggcctaccagtacttgtaattttaattttaattgatttatatcattttacttattaatattcatttgaatcttagtttataatatctataatcatatgctatgctcaaatgtaattgagttactttttagagacaaggtctcgctatgttgcaggtttcaccatgttgtccagggtggtcttgaactcctgcgttcaagcaatcctcctgcttcagcctcccaagtagttggatctacagggatggcatgcaccatcatacccagctctgaactattttttaagtaaaattttttttagatgaagacaagcttgtatacaagagtagttaagacagtgtggtactgactcaaggatgtactaatagacaaaggatagaaaacagacccacacacatacagtcatacagttacagcaaagatgccactgggatatagaggagaaaggatagtattgggatcagtggatattcatatggaaaaaattaactcctaccttataccacacaccaaaattaattctatatgattgtacataaatgtaaaatagaacaataacacctctagaagaaatcgtatgaaaatatcatggtcttggttaggcaaagctttcttacaaagaatttaaaaatgttaacaataaagaaaatatagtctggtccaaatgcagtggtatttacaactaattgatcacagccagttacagatttctttgttccttctccacttccactgctttacttgactagccttaggaaaaaacaatttttcaggaaaaataagttggatgtgtcaaaattgaggacctttccccagaagacattgtgaaagtgaaaaggcaaaatataaagtgggcttaagaattatgagaagttcagcacagaggactagtggaagaaaatatgtttgtacataatttctttccctataaccaatactaagaatagagaaccctatatttaactgaaggcagaaaatattttgaggccatatttgttctcattttatgccatttacttagtaaatgtacataccttatagattcatgcatataatatacagtcctcccttggtatcttcaggggattggtttcaggacccctctcacacatacacaggataccagtattcaagtcccttgcataaaatggtgaagtatttgcatataacctatgcatatactcccatgtactttaaatattaatctctagattctttataatacctgatacaatgtaaatgccatgtaaatagttgctataccatggttttttgtattattattattattttttattgttggatttttttcatattttcagttcatagttggttgaatgtggatgcagatacagtgggccaactgtatacatattttgggatcattttagtgggtagtaaaacttggttttccccaactgtttctgttaattcacagccagttatgaaatatgccacatttgtcctgattaaatagtgaaatgtcttagccctttccactgattatattgatagaaaagattaaaaagtggtggataaacctaaccaaaaaaaaaatgttttcataagccactgctgtcagcacttatttgagattttaaaacattttgtagttctttatttttaaatgaccttacattttcaaaagggtttgttaattcaaaaggtctcctatggttaaggcagttcaaatagtagactgagggtagaagagggattgactgtaaataggcatggaggtatcttttgggggtgatgtaaatgttctaaaactggattgtggtgatgtttgcacaaaatttgcacaaaagcattgaattatacactgaaagcatattttatagtgtgtaaatgaatgccttaataaagcttttttttttttttaaggataccattaagataatgaattgtccagccacagattaggagaaaacatttacaattcatgtatctgacaaatgattgtatccagaaatcaataataagacaaatcaatagacaaatagcataatttttaaaaattgggcaaaagacttggacacttcatagagggaaataatctaatggccaaataagcacactaaaagaggatgaacattattaatcattaggaaacacaaattaacatcacagtgagatactgacccatcactcatccacttgaatggttaaaatcaaaaggactactaattgttgacaaggatgcagaacaactggaactctcattctttgctggtgagaccatgcagtgggaccacacatttgaaaaactgtatggtagttttttattttttttttcctggtaaaaattaaccgtacatctaccctatgatccagcaagtcatttacctgagaagaacaaaaacatatatccacaaaaagagttgtgcaagaagattcatagcagcaaacaggcatgttcattaacaagacaatttttcagcacattgtgtttttttttttttttttttttttttttttgagacagagtctcactctgtcaccaggctggagtgcagtggtgcaatctctgctcactgcaacctccacctcccaggttcaagcgattctcctgcctcagcctcccaagtagctgggactagaggcacgcaccacgacacccagctaatttttgtatttgtagtagagatggggtttcaccatgttggccaggatggtctcgatctcttgacctcatgatctgccctcctcggcctcccaaagtgctgggattacaggcatgagccaccgcgcctggcctatgtattcatttaacagtacactactgggcaataaaaataaatgaactactactacccccaactacatggataaatctcaggaacattatgttgaacaagaagagtcagatgcaaaacagtatttgtgttctacattataccattcaaacaaacaaaaacagtctataatagaaatcagaaagtagtttcctttttgttagggggtatagggattgactggtaagagacagtagaaaactttctgggattatagaaatgttctatgtcttgttttggataaccatttaagatccgtacatcgtattttatgtgatcatacctcagtaataagaatgcaaaatgctacaaaagcaagtcaacccaacatctctactaataaatctcaccattttaaaaagaacagtaaatcctacatctctattttgagaaaaaataattataattttatttaatgctatttaacatatgcttatatatgacatataaattgtgaaaagattatttaaacaaattggctaaagaaacttcatgaagaaggtgaatcttttgccttattgcatatgcttttatattgagtaaaaccaaagtgatttcccatggtagcttcttatactctgttctcatactctttcttgtgataaaatggaaactgatgttcttcccatgaaagggtaattatacattaatgtactctttttccctcctgtcctttttttattatgaaatatttcatatatcaaagaatatgtctaacatatgtgtattacaaagtatatcctctgcctccctcctcatttgaagatcctgccaatcctctgcagagctaatgcttattctgactttggggttttcatttcctttcatatatcccttatatatgtagtcctagtaggtgtatacatatgtatatcatgaatagttatatatataataattgcaaatacatcctgtttatttaatgggttatgtttctttaagttccaatacaatattttctaaattagaaaggtattacaattttaaaaaatgtgccaggacaaaattaataccaaattacaagaatggtaaagcttagaacattgtcattgactataaataatagctgcaattctattgttggtttcttttttcactagtccattttgataatatttcttgttgtggccaggcacaatggctcatgcctgaaatcctagcactttgggaggccacggcagatggatcgcttgagctcaggagtttgagaccagcctggacaacatggcaagaccttgtctctatttaaaaaaaaaaaaaaaattgttgtagtgaagcagtgttttctttcccacagaatatcgttcttcatttatttataaaaatatgatttggtatatatgcaaatgtagcttattttatatataaccatactgtaatagtctttgtggtaagcaattcagttaatatgactacaggtttaagatataatgtgaaatttggaatagattttaacttttaaaaaataatttatgttaggctgggcacggtggctcacgcctgtaatcccatcactttgggaggccaaggcaggaagatcacttgagcccaggagttcaagaccagcctgggcaacatagggagaccccgtctctacaaaaaaaagaaaattagccctgcatggcccatgcctgtagtctcagatctccagaggttgaggctgcagtgagccatcaccatgccactgtgctcccacttgagcaacagagcaagaccttgtctcaataataataacaataataatataacttatgttaagggctggtctttctttttctatatttaactgattaaactgattaactgtttgttgtttttttttatgtcataggtgtcagatccagctagcagtgccataagccagaattatagatggaagtgggggagagagagaattgtcagaaaaacttactaagatttctatcctggccaggtatagtggcttatgcctataattccagcattttggaaggccaaggtggaaggatccctggaacccaggagttcgaagctgcagtgatctatgatcatcccattgcactctagcctgggatacagagcaagaccttgtctcgaaaaaaaaaaaaaaaatctaagtggcttcatacagaaagtttaaagttaaatgtatactgttatgaatatcttattaaaatgcaagacaatcagagactgatctaaaagtaatcaaggatgatcatgtcttgggagtatcctgtttctcagttgctctggacagaaagcacctagaaggttgagataattcaatgcaaaatcagagatttccccccatgtaatcaacctcagaacttgagttggtcctaacagtagactcaaccccttggaaaagactaggcagagcaattttcctattgactacatctgagacgccattcattcttgtgtcacatgagacatagcatatactttttaggtctctaataatagcagttctctaagaagcaaactgggatgaaagacactattcacttattttcttaaatggggaaggcattaaaaggagtgaaggtttattaatgccacttttaaagatataaatagtagatttttattctaataagtcatacatcaataaaatttgttattgcagctccggggcagcaattacttatatattgacaacttatacatgttttacatgcccatttgctctccttttcactactgaaatgtagttaccatagcaatgaacacatcacatggttcctgtgctagttctaaaatagagaacagcaatatgccatatgagctctgcttattttctacgtaaggactgcatatacaacttgaggctattccataaccttctcagtgcagatagcttatcattgatttagaaagctttcaaagtaaaaagcaattggcagtaatatatttcaagtctctagcttctcttgtactgttatttgccactgagctaaaagaacagtttcactagctttgaccaccagggactctgctgttgtatatttagccatagattgtctatggaatagcagtgccacttagaagattggtgggagaggcatatatagcattcatggacacattttctaagtcttactgagcaattcttaaccaatcttagcttttctcctactgtctcccttaatgtttcaagtttttaaaaatataggactctgttttagaatttgaggaaaggaagatgccaggcacaactggaggcatgctattagttccttttatgtccattattgttgtgtaaggttttaaaatgcattggttatatagcagtttatctatagaaaaggacttcagatttcagtgcctggtggtatcaggccgtatttatgccttactatcacatttagagtgtgttgtaggctgtcagacctccagaaataaagtaggaacatacccctcttactgtgactcttaccagatacttatttgaaacagtccaagcactggcatattagggaatggtgctaactctttctaaccattaataagcaaaataaatttcaatgtgagcttttggctatactatacctatggtcaagtggcactacaaattcaaaattttaaatattctttattgaaactactaggaacaactgttttatatatagtagaggaaaccagggctttattctcttgactgaaacgtgtaagaagtgattcataggtcttcaaacacaaattagtaaatttaggaagctaaaaaggcatatatatttgactactgatgggggcaatatgttgattgtgtaatatttttatctaccctttcatctcagttataatttaaaaaccatttatatactacataaactatgtaatattggatacttctgtgtctatataatttgcaacaaagtagaataaatggccagagatgttattgtaatcttatggttgaatgttatttcttttttctaggtcattgtttaaaatctggacatcatagaaacagataatgcagagagaaaattctttcataattccaccacatctcaatctttgttattagttttaaaatatgtccttctagacatattttattgtaaaaagtatttaaaatactcattttattttattgccgcaagagagagaagggcatttattgtagggcaccaagcaaggaagatgggcagctcatgcttaagacccaacctccctgctggcttacaagcatgggtttttaaaggcaggggtacatttcaggaaagtagaagttacaggcaaaattgttaatcaatacatagaggttatacatgggttggctcaaaaaggagtaaggttttgagtgggggcttacaggtcatcaatggattaggagattctttgatttgcagttggttaaggaagaaaggctttgtctaaaaacttggggtcagcagaaaggagtgttgaggtttggccttaacataggttagttaggataaggaaacctgttaatcattatggggtgctatgtcagggtcaaggtatgagagcaagccacgatgcactgggtcagagtgaccagtttaggaaattgatagcccacaggtgtgactctctccaggcccctcaggaagcaatttagaacaaagagcagcagtcagagttcagtcttcagtttccctttatcaaaggtctatgtgacagcagttgacattttcttttttctgttttcttaaatttatttattaaaagaagtgtctcattctgttgcccaggctggagtgcagtggcacgttcatagctcactgcagtctcgaactcctggcctcaggcaatcctcctgcctcaacctcctgagtagctaggactacaggcacatgccactgtgcccagctcatcattttctatctggtgggtatgctggcatgttggaggaaggacctggcgagaggtgcttggatcatgggggcagttttccccatgctgttctcatgacaggagtaaattctctcaagatctgatagtttaaaagtgtgtggcagtttcctgctcgtgctctctgtctctcctaccactgtgtaagatgcaccttgcttctccttcaccttcagccatgattataagtttcctgaggcctccccagtcatgtggaactatgagtcaactaaacctcttttctttttaagttacccagtctccggtagttatttatggcagtgtgaaaacaggctaatacacttggtttctgaaaagtaatttggctggctttgaagtggggatgggccatgagccaaaggatgcaggcacttctggaagctagaaaggcaagaaaagattatcccttggagcttcaaaagaaatcaaccctgcatgcaccttgattttaccctagtgaggccgggctggacttctgatgcttcagagacaagggttcctccctcatctgtctcaggaagacttaggactaactttaggctttgaagtaaacagaagctgaaacatttgaatgtttgattttcatgatccagaactcaagcctcataggtcccatgcattccctgaacccaataggatgtcacagtctgcataccttcacaccatggcagtctggcttcttccctctcaggcctgcagcctcatgctctgggcttccctggaagctggtgttgtgggggcctgcagttgccaccctgctgtgtgtcagcactgctccctgacgctgttcatccactgacctccattccttggcccagctgcccaggcatggcagactacacgcaacctgggttgtggggaccaggcggagccagcagcactaggacctgatggccaaaacactcattttaatgaaatcatactttaattctgttttgtatcttctcacataaaatagctagatctcttttcctagtagtacaaacttatctatctgccttattttgtataagagtggtattatatgaatacatcattgtttattcttctattgaaagcttttatgttgttttctgggtttttgttattatagttctgtagtaatatgtcttatgtacttttgtgtaaatagttctataggctcaatctccagaattgaactgccaattcttagtaaaggaaaatttaacttttgatacattttaccaaactgccccttcaggggattctaccaaatcatattctctgtttaaatgtctttttaagctttgccaaactgatatatttaaaatggtattttattgtttcaatttgcagttttagaggtaatgttgtaattctatatcttttcatattatagtgcatttatattttcctcttctcttaactccttgtttgcctagctttctttttcttttggttggttcaatttttccaactaagttttttcatgttgtttttttttttctttttcctttgtatttgggaaataaatccttacttgtaaatacttcttgcagtttgtccattgactttttttttgagacaggatcttgctttgtcgtgcaggctggagtgcaatggcatgatcacagctcactgtagcctcaaccttgcagccctctggccacaggctcctgagtagctgggactacaagtgcgcaccaccatgcccagataatttttttaaaaaatttttttgtagaaaaaggacctatgttgcccagactagtctcaatctcctgagctcaagtgatcctccctccttggcctcccaaagttctgggattgcaggcatgagccaccatacccagcctgtctgttgattttattttcggtgctttttttgtatatggaactttttctattagtatttagtcatatttgttagtcttgtcctttatcccttctagcctttaccttatttagtaatatcagatgatgtgtttcatatgggtctaatttatgcattcattcacttacagaagctaatcatttgagtcctagtgtaccaagtatcttagatgatgggtcattgctgactgtacaatctaagaagaatcttatttgcaacaatgatgctttagcgtagcagcagaccaaattctctaggatgattagcagctaattctgaatattgctgtaaagtcatagtagcatgtaacatgtacagcaatagtaaaaacatgtaacagtttgttccttcctaaaattttgttaatttagtcttttatgtgtccttatatttataaatattagttttgtggctaaaatgtgtacatttttccaagttatagtattgagaagcatagctagtagcatttcacccaacagaaaaaattcctttagataaaagccaaatcacagttggcctcattctacatactgttctacaaattacaaaatcagtaaatgtttattgggtacctgtttttattgctaagctcttgcaagagaaagagagaggtggtaggatttttttaaggtgcgagctattatcctatttttaaagagctcataatctagtttggaatgtttggcataagtacatccaaaggtaaataataaaacaaatgataattgctcaacaatatgtaaagacccccctctccaaaccaaaacaaaacagaacaacaaaattgtcagtctcttctgtgagcagtattatctgctgaggacatgttactggtcgaagagctttggctgcagtcattcctagaatgcaaaatgaaatcatccaaaaaactgagagtggccagttttactagtcaaatggagtaagtggtcatctgtgagtttgtgaatctgtctgccagaatatatttattttcttgcttattccaccagttactccttcttgttaaagctttcaccgttattaaagagaagtacctcctggaaattttagcctgctagatgttgtcaaacctgatagcacagtgtgataggctaagattctttgttcatttgttttggatagggaaggaaagacacaatgaaaagactaggagtctgaggtgagggaagatgatgaagaatatgaatcaagggatcaggcatcaagataaccgttcatttatttaaatgtagactttatctgtcttgatcaggcatcaatataacctacatttatttaaaagtaaactttatttgtctaatgtatgtgttcctaatccctgaatctattcatttcattgaaattgatgagtactttcaatacaaatagttacaatattttaagatgttcactgtttataacatcattatatgagtccatgttaaaccagagaagcagaaccagtagacaatatagatttagagatttgttacaaggaattggatgatggaagtatggaggctggctaagcgagtccaaagcccagtcaagaggaaagcaggctagaaacccatgggcataagctgtttagagtccctcagctcagggaaagcctaagctctctttcaaagggctcacctaactttgccttgtaattttctataatggattcctagagtttaccaactaatatgacggtctagagttacatttaagtgaaatttgattgtgagattgtattcttaactgtctatatctggtgctcttgagcacgtatacaaccttctcgccttctctaggtccctaaaagtcatttcttaattcaaaaaatatttaaatgcctgctatgtaccaagcacttctcttgatagagtggtgagcatgacaatctagtagaaaagtgagacagggaaacaccaacattactgtggaaaacatagttacaggggaagtagaaggacattagtcatgtttttttcttcatgacccactgcctaacacatagtagatgcttaataaatgccttttaaataaataagaccacatggcatttttaaaggagtaaggacctctttaaaaataagtatatatggggaaggaaagagatgatgagaagactaggagtctgagtcttgctacagaactagggtaactggagctagtagaaaagcaaagaagcttctgatttggggatggattcaagagtatattgggatgggtgcaaacactttcactgattagcagtttacatatttccttcaaggatagtcttactctccttgtcctaacttttaacctttgcttcaaattagtttagcagtttgtactaagaggaattgccagtgaccaagtgaatatgatatacatataaaagaacagagaaaatcaagtctttactatgttgctgtatcactaattcaggcttccagctaaatgccagaacataaattaggtcccttatcaaatctggcacaaaaatatttaggatcctttttaatatagtacatgtgctttcaataaatgcctgctttggcaaaaaataaaaccagtgttttttgtgtcaagtacaagctgttgtactctgtaacttttaaactgtccttgtgaaccaggttgagggtaaaattaaatttggattttgtattcagttttacaatcaacaaataccattttttttctttgtgttgtgttgtcttatgggtgtttgttttattttggtttggttttggtttggttttcacttagaacaaaattcaaaatctactaaatactccctagccacactggcctgttttcagtttgagatttttttatttttaattttttttaaagatgacatcccactgtgttgtccaggctggagtgcggtggctattctcaggcatgattatagcacaactacatccttgaattcctgggctaaagaggtcctcctgcctcagccactcaagtagctgggactataggcttgcacctccacacctgacttctttctgtttttaagacagttgagctctttcacctgtcccctcaaactgtttgtacatgctcttccctctgccttgacctatttttacatcatgttcagtgttactcacccatcttactctcactaatttattaagtctcaaatattttctcagagattctttcttcacccatgcctccatatctcagttagatctcccttaaaaatctcttctgtgttactagttcctagcatatagtggatgtgtgataagtgaaaggatggactgaaacatagagcacatacaataggtatattctagtcattataaaatgtcctcaaggaactttcttaaatctgagttccaaagggccatgttattttgtaaataatattcttacttttactttagggaacaaaatcagcatttttaaatgaaatagatttaaaaatataggcatgtacattgtataaatgcatgtatacatatgtctaaatatggcaagttgcaaagtaacatgaataccatgattgctgtcataaaccttgaaagccactgtgttagtggatactgttgtataataatctccaaataagcacgtctagaaaacaacctgttttacttatcaatttccccaaacatctctctggtgactgcgtctttggcttcttttttatttatttatttattttttattattatactttaagttttagggtacatgtgcacaatgtgcaggttagttacctatgtatacatgtgccatgctggtgcgctgcacccactaactcgtcatctagcattaggtatatctcccaatgctatccctcccccctcccccaaccccacaacagtccccagagtgtgatgttccccttcctgtgtccatgtgttctcattgttcaattcccacctatgagtgagaatatgcggtgtttggttttttgttcttgggatagtttactgagaatgatgcgtctttggcttctaagagttctttgctgagagtaaagagccagaatctcagaaatcccccagaaagacgatttaagttaaatgcacccatcaagctttgaaggaaggcggcttaaaaaaagaaaaacactatattacattctacttttaattttcaaaacctgaaaaccttctcaaatccaggaaaactaatggtatttccatctattctctttgatagcccacaattcctatgattttcttagcatcccataatacattttgcttttatccttttactgtttttcttcctagaattttctttcaaggtccaacacagaaatcctttttctcaacaaacctttcctgactaaccctgtttccttttttaaaattctttgcattttctcaacagtttttgatatttattttttaacgtttgtatacaatactataatacagtcagttatttataactttattttgtgttagaagtaggttttttgtgtgtttgcattcttcctaattttacatgtgcaaaaagttactttaatcttatttttcttaaatgaaataatccaattttaaatccctttcctggagaattaaatataagtcattttgggggtgctttccttcacctcccccagaatctcacacaaaataaaacattcagagaattaatcgcccctgccccaccccaccctaatcttctgtccatgttggctgtcctgagttgtccactgttaaaccacataatcccttatagttcagtggctctgttgcttcttaggacatgaacatcttggccaaggcttcaatagctttctgtgttggatattttctcctggcatctccagatagactttttactcttttctttccctattctgtgcccaaaggccctgagaaaattgctaagtattagtaacatggagaaaaaagggatatagtttctgggactgtaaattattcaaaggatagttttaaagctctgggaaagtttggtgaaagttaaaaacgtgttcagagaggaggagttggagcctagtcaagtcacaaatcttctaattcagccaagctctagtagcactcctgaaacattactactatatccttaacatgtgcttttttagttcatgaaacaatattggcataactgttcccctaacaacttaatgagaaagttaaagattttaacaactcaagattgctgcctatgatacttatgatttttaaacaagttgtcatatcaataataataataaaaaaaccataaacctagctgggcatggtggctgacgcctgtaatcccagcactttgggaggctgaggcgggcagatcacctgaggttgggagttcgacaccatcctgaccaacatggagaaactccatctctactaaaaatacaaaattagctgggcatggtggcgcatgcctgtaatcccagctactggggaggctgaggcaggagaatcgcttgaacccaggaggcagaggttgcagtgagccgagatcatgccattgcactccagcctgggcaacaagagcgaaactccgtctcaaaaaaaaaaaaaaaaaaaaaaccatgaaccttcctttaggaaatagagcaatgtagtataaccccacttgcaattttatttttcagattaatgaatatgattaaaattaagatggaataaaaattaaaacaattaaataaaatacaaattggttgtataataaagacaaaattgttatcttgagacacatgttgcatctttccatatgttctaaaattccttaggaacttggcacaagtgctgctgaaataatttctgactgataagtggcagatgccttatcttttattgtggtattaattctaaatcccatcaaataagacaatgcatgatacaaaggataaatttataagcatttgcctcccaatttagacacagaatcattatcatagtacattcactttcaacttgtttctatgttctttctctccttcacatctggcctcttcatgtttttattttctctctctctcttttttttttttttttttttttgtggagacagtctcactctgtcacccaggctagagtgcagtggcacgatcacagctcactgcagcctccaactcctgggctcaagtaatcctcccacctcagcctcctgagtagctgggaccacagacatgcaccaccacacccggctatgtttttgatgtcttgtagagacagggtctcactatgtgagaggctggtcttgcactcatgggctcaggcagtccttcctcagtctcccaacgtgctgggattacatgcgtgagccaccatacctgggcctgttttctctttcttttcattctaaccataatcacttatctatttatggtttttgtttctatttctgaatacatttaaatgccagttataaaatcagaaattcttatttgtgcttaaacatagtaagatttagcagtagtttgaacttcaacatgattattaaatgtggattttaatactagtgatgattcacattttccaacttttatactttacaatttgtttttcttgatgagagtttaggtatctatgaatgaggagaaaagttaattgaattttggcttctagaaacaagtaattaatcttttcctgttaccttttaaaaagatactttactttttatagaaagatagcagtagaaaagaacaggtatttaaatctactcactgacttagaccaattatttcataatggaatctctacttctgtgaatatgtgttttgcttaacgagacctcctaaaaactcatttttatggtcattgaattttagagttagaaaagactttagaaagtgttattagcctctcattttttaaaaacagtttgtatcttgcccaaagtcacactaggggtaaagtaagaggcaaaggaagaactggaattcaagtttctagattccaagtccaggactctttctttttatctcattattttatgaaacatggagagcaagctgattgttcatttaagttcattacactgtatcttggaatttgtcatttctatgcttcactatttaaattaaaatattttatgtttatcacctgttttttgatctgccatgtaagaattttcacttattgtcttccctttaacattgagtctgcatactgctgctaaataatctttctacagtatagtcctaattatgtccctcaaaaaccataatatatctcaccccttctatcagccacatagttaaataaattaaatccaatcatttaacccattgcagactaaatctgcctttcaaatcttagtactttccactcctctgctcatattttatgggccaggcaaatggactacttacttgctattctcaggacacacgtctcatttttcataccactctatcctttcttatacatataacaactttgcctaaaattgtgcccatttgttgagactttgatcaaatttcacatttcccatttcttttgttctctctctctctgttttttttgttttttttgtttttttttttttttttgagatggagtctcgctctgtcgcccaggctggagtgcagtggcgcgatctcagctcactgcaacctccgcctcccagattcacgccattctcctgcctcagcctcctgagtagttaggactacaggcgcctgccaccacgcccagctaatttttttgtatttttagtagaggcagagtttcaccgagttagccaggatggtctcaatctcctgacctcgtaatccgcccgcctcagcttcccaaagtgctgggattacaggcctgagccaccgcgccaggccctattctctctctttttaattccaattacagtgtagtacaagcttgtccaaactatgacccatgggccacatgcagccctggatggctttgaatgcagcctaacacaaattcataaactttgttaaaagattatgaggtgggtgttgctgggtgtgtgtgtgtgtttagctcatcagctgttgttagtgtttgtacattttatgtgtggcccaagacaattctttttcttttaattgtgaccaaaggaagccaaaagattggacatcctttatgtattatattctgactttaaatattgctttccccttaatttttttttcattgtcatctcctcactttattgcaagtacagtcagcatcaatgttgagaactttttctcctaggaggtacaggatttggctctgatacggtgttgcctccacagttgctcagaatctaggctccatctgttacaggaaaggggtcctaatccagaacccaagagaaagttcttggatcttgcacaagaaagaattcagggcaagtccacagtgcaaagcaaaagcaagtttattaagaaagtaagagaataaaagaatggctactccatagacagagcagccctgaggactgctggttgcccatttctatggttatttcttttttttttttttacatgttctattttttaataaaaatatttatttggtcttatgaatacagaattattttatttttatttcaaatgcctaggtattataattctgtataatagttatttgtactttttatatttttatcttttttttattatactttaagttttagggtacatgtgcacaacgtgcaggttagttacatatgtatacgtgtgccatgttggtgtgctgcacccagtgactcgtcatttaacattaggtatatctccaaatgctatccctcccccctcccccaaccccacaacaggccccggtgtgtgatgttccccttcctgtgtccatgtgttctcattgttcaattcccacctatgagtgagaacatgcattgtttggctttttgtccttgcagtagtttgctgagaatgatggtctccagcttcatccatgtccctacaaaagacatgaactcatcattttttatggctgcatagtattccatggtgtacatgtgccacgttttcttaatccagtctatcattgttggacatttgggttggttccaagtctttgctattgtgaatagtgccgcaataaacatacgtgtgcatgtgtctttatggcagcatgatttataatcccttgggtatatacccagtagtgggattgctgggtcaaatggtatttctagttctagatccctgaggaatcgccacactgacttccacaatggttgaactagtttacagtcccaccaacagtgtgaaagtgtttctatttctccacatcctctccagcacctgctgtttcctgactttttaatgatcgccattctaactggtgtgagatggtatctcattgtggttttgatttgcatttctctgatggccaatgatgatgagcattttttcatgtgtcttttggctgcaaaaatgtcttcttttgagaagtgtctgttcatatccttcgcccactttttgatgaggctgtttttttcttgtgaatttgttggagttcattgtagattctggatattagccctttgtcagatgagcagattgcaaaaattttctcctattctgtaggttgcctgttcactctgatggtagtttcttttgctgtgcagaagctctttagcttaatcagatcccatttgtcaattttgacttttgttgccattgcttttggtgtcttagatttgaagtccttgcccatgcctatgtcctgaatggtattgcctaggttttcttctagggtttttatggttttaggtctaacatttaagtctttaatccatcttgaattaatttttgtataaggtgtaaggaagggatccagtttcagctttctacttatggctagccagttttcccagcaccatttattaaatagggaatcctttccccattgcttgtttttgtcaggtttgtcaaagatcagatagttgtagatatgcggcgttatttctgagggctctgttctgttccattgatctatatctctgttttggtaccagtaccatgctgttttggttactatagccttgtagtatagtttgaagtcaggtagcgtgatgcctccagctttgttcttttggcttaggattgacttggcgatgcgggctcttttttgattccatatgaactttaaagtagttttttccaattctgtgaagaaagtcattggcagtttgatggggatggcattgaatctataaattaccttgggcaatatggccattttcacaatattgattcttcctacccatgagcatggaatgttcttccatttgtttgtatcctcttttatttcattgagcagtggtttgtagttctccttgaagaggtccctccttgaagaggtccttcacatcccttgtaagttggattcctaggtattttattctctttgaagcaattgtgaatgggatttcactcatgatttggctctgtttgtctgttattggtgtataagaatgcttgtgatttttgcatattgattttgtatcctgagactttgctgaagttgcttatcagcttaaggagattttgggctgagacgatggggttttctagatatacaatcatgtcatctcaaacagggacaatttgacttcctcttttcctaattgaataccctttatttccttctcctgcctgattgccctggccagaacttccaacactatgttgaataggagtggtgagagagggcatccctgtcttgtgcccattttcaaagggaatgcttccagtttttgcccattcagtatgatactggctatgggtttgtcatagatagctgttattattttgagatacgtcccatcaatacctaatttattgagagtttttagcatgaagagttgttgaattttatcaaaggccttttctgcatctattgagataatcatgtggtttttgtctttggttctgtttatatgctggattacatttattgatttgcgtatattgaaccagctttgcatcccagggatgaagcccacttgatcatggtggataagctttttgatgtgctgctggattcggtttgccagtattttattgaggatttttgcattgatgttcatcaaggatattggtctaaaattctctttttttgttgtgtctctgccaggctttggtatcaggatgatgctggcctcataaaatgagttagggaggattccctctttttctattgattggaatagtttcagaaggaatggtaccagctcctccttgtacctctggtagaattcagctgtgaatccatctggtcctggactctttttggttggtaagctattgattattgccacaatttcagagcctgttattcgtctattcagagagtcaacttcttcctggtttagtcttgggagggtgtatgtgtcgagggatttattcatttcttctagattttctagtttatttgcgtagaggtgtttatagtattctctgatggtagtttgtatttctgtgggatcggtggtgatatccccttattttttattgcgtctatttgattcttctctctttttttctttattagtcttgctagcggtctatcaattttgttgatcctttcaaaaaagcagctcctggattcattaattttttgaagggttttttgtgtctctatttccttcagttctgctctgattttagttatttcttgccttctgctagcttttgaatgtgtttgctcttgcttttctagttcttttaattgtgatgttagttttgagcctatgtgtgtctctgcacgtgagatgggtttcctgaatacagcacactgatgggtcttgactctttatccagtttgccagtcggtgtcttttaattggagcatttagcccatttacatttaaggttaatattgttatgtgtgaatttgatcctgtcattatgatgttagctggttattttgctcgttagttgatgcagtttcttcctagcctcgatggtctttacaatttggcatgattttgcagtggctggtaccggttgttcctttccatgtttagtgcttccttcaggagctcttttagggcaggcctgatggtgacaaaatctctcagcatttgcttgtctgtaaagtattttatttctccttcacttatgaagcttagtttggctggatatgaaattctgtgttgaaaattcttttctttaagaatgttgaatattggcccccactctcttctggcttttagagtttttgccgagagatctgctgttagtctgatgggcttccctttgtgggtaacccgacctttctctctggctgcccttaacattttttccttcatttcaactttggtgaatctgacagttatgtgtcttggagttgctcttctcgaggagtatctttgtggcattctctgtgtttgctgaatctgaatgttggctgccttgctagattggggaagttctcctggataatatcctgcagagtgttttccaacttggttccattctccccgtcactttcaggtacacaaatcagacgtagatttggtcttttcacttagtcccatatttcttggaggctttgtttgtttctttttattcttttttctctaaacttcccttctcgcttcatttcattcatttcatcttccatcactgataccctttcttccagttgatcgaatcggctcctgaggcttctgcattcttcacgtagttctcgagccttggctttcagctccatcagctcctttaagcacttctctatattggttattctagttatatattcatctaaatttttttcaaagttttcaacttctttgcctttggtttgaatttcctcctgtagctcggagtagtttgatcatctgaagccttcttctctcaactcgtcaaagtcattctccatccagctttgttccgttgctgctgaggagctgcgttcctttggaggaggagaggcgctctgctttttagagtttccagtttttctgctctgttttttccccatctttgtggttttatctacttttggtctttgatgatggtgatgtacagacgggtttttggtgtggatgtcctttctgtttgttagttttccttctaacagacaggaccctcagctgcaggtctgttggagtttgctagaggtccactccagaccctgtttgcctgggtatcagcagcggtggctgcagaacagcagattttcgtgaaccacaaatgctgctgtctgattgttcctctggaatttttgtctcagaggagtgcccggccgtgtgaggtgtcagtctgcccctactgggggatgcctcccagttaggctgctcaggggtcagcggtcagggacccacttgaggaggcagtctgcccgttctcagatctccatctgcgtgctgggagaaccactgctctcttcaaagctgtcagatagggacatttaagtctgcagaggttactgctgtctttttgtttgtctgtgccctgcccccagaggtggagcctacagaggcaggcaggcctccttgagctgtggtgagctccacccagttggagcttcctggctgctttgtttacccaagcaagcctcggcaatggcgggcgcccctcccccagcctcgctgctgccttgcagtttgatctcagactgctgtgctagcaatcagcgagactccatgggcgtaggaccctccgagccaggtgcgggatataatctcctggtgcgccattttttaagcctgttggaaaagcgcagtattgaggtgggaatgacccgatcttccaggtgccgtctgtcacccctttctttgactaggaaagggaactccctgaccccttgcgcttcccgagtgaggcaatgcctcgccctgctttggctcacgcacagtgcgctgcacccactgtcctgcgcccactgtctggcactccctagtgagatgaacccggtaccccaaatggaaatgcagaaatcacacgttttctgcgtcgctcacactgggagctgtagactggagctgttcccatttggccatcttggctccgctactttctttctttttttttttttttttttgagaaagattctcactcagccaccaggctggagtacagtggtgcgatctcagctcaccgcaacctccatccacctccgacattgaagcgattctcctgcctcagcctcccaagtagctgggactacaggcgcatgccaccacgccctgttaatttttgtatttttagtagagacggggtttcaccttgttggccaggatggtctcgctctcttgacctcgtgatctgcctgcctcagcctcccaaagtgctgggattacaggcatgagccactgtgcctggccattcttgctactttcatagcaaaacatttggctttggctttgctattctgctttattgtactctttgatatccagtatctaccagtaatgtctggactgcatacatcgttgaaaatacaactgtaattaaagatttaaatgcaatattctttcaggaaaatctctttccctgattttgtttgatattggaaatgaaacaataccataatccttcaggataacttcccacagcaggacaactgcaggaatggcacaaaatatgaattgcataaatactcttatagaacacatcagactagcactttcccaagtttttagtcagatctttgctaccatccctgaaactgttaatgcatatgagtagaaaaattttttacctttgtaagcaaagattctactactagaataatcaaattaactcattctaatgcacatttacttaattcatactatgtgtgaggcagttttaggatgtgatagaaaactttgttttgaagaagctgataaactaggtgggggggaaacagagtacaaataaattataatgcaacataagaaatagcataatagaagaatattcagaccactaaagtcagtcaactctgatccccaaaattaagtatgaaccacaaaaaaatcaagtcagtgtcaatctaatgcagatttatttgagggcttctcttttcttctttgcttaatgtaggtgagtgctttatccttgctatttggtaaatcagcaaggatttattatctattctttgcagagtagtatgttagatgctttgaggatactaaatgaaaaagagtttctgcaccaagaatgtataatctagtagaggagataagctatctatacaaataactgtgtctgcagtctgcacataattgttataaaagaagcctttacaacttgagccaaattcttttacaatgcagaaagccactcctggaggtagagaaaggagagaacatgaacaattcaagaagacttctgttatgcaaaagatggctgaactaaccctggagggatgggtaggattttgacaagagtggttgaaggtattctaattcacttagtacctacatgtgcgaggcagcatgaaggcaaaaaagcctggggcatgttcagagaatagcaagtattctagtttgagtggcacctggtacgtatataagggaatagtaaaagatctggctggaaaggaaaagtaggggcaggttacgaaggacctctgaaagtcagactgtggaactggaacttttatcaggaagcagtagttagttttttcaagcaaaagctaattagagttgatatttaggaggatgaatctaacagttgtgtgcaaggatgccttcaaactgagtgagactagtactggagactggttaagagactacaacaataacctgagtaagaattaatacaggcctgacctagttttgagtgagtaggattggaaacaagagttttaggtattataggatttatgcatataaaatggacttgacagaacttgaagaaagagaaagtgtcaaaaggacacagaaagtgaggcaggatatcttacaatgttaaaggaaaggaataatagaagttaccccccaccccagagaaaaaaaagtaaagagaaaagattggaaagttaaaaactgaacttttagagaaagactgcatttagggaatgtagcaaataagataagcaacagaaaagtgagagaatgggaataaagatatgcaacagaaaagaagggaagagagttcctaggaaagggtggggaaattcaaattctaaaatatcgatgaagtctcatttttcatgtattaaattatccagtggagttggaagatccaaaagagagcaattaaatatgctagagtgcatggggaaaattgacaaaagacctaaaagaaaaatatttaaccacaaaatgaaaagtaataggagatgctaagaaattttggatgggagttaaaattaaatctctgaaagaataaaagggaattaatactcaatttatatcttaaataaatatttctaaatgttacactatgcagaaatccttcttccctggaaaaaatgagatcaagtcctattcaaaaaggtcaagaagaaagactgaggttggtgacccgtgagaaaagtttctgagataagtgtaggtggaatttgtagtattatttatcataagtcagatggctgttaacaaaaagttaattttacatctcatctgttagcccagtcgctttataatgttcggtacaacagaaatgccactactttgtaaccacctaaatgctgtattaccttcaatttccattgtgttgttgatacccaagcagaactcattctttgtcatggagactacagaataccacaagcaggcactaaggttggataatgtgttatctcacattctgaaaggagggtctacatggtagatacatttcttgattctgttttgggataattggctcctaagataattggctatttcattattaaatgcagtatgaactttgcagaagtattcagtatctcttaaaacctgtttcttttccatatagcagtggtacctactttcaatttagtatttattcaccatctactacatgctccacttagtgttttgtattatttctctgtgtgtgtgtgtgtgtgtgtgtgtgtgtgtgtgtgtgtgtgtagtctaacttgtacatttggccaatttctttttcaagcatgttagatttttctctctgacttctttgtagatgtggggtagttttgttttttacttaagagacctgtattgattatttctatggctgtccttgctaattcccactggccattgtgaaaaatcttgtctatggtgtatttgtttctaagacagccacattacaatacactctgtacataattactatgaatcagctggcaagaaagaagaaaataatactggttattggtaatatttgttgattttatatgttagctttattaaagatttttttttcttatcttttttctttcaactattgctacctctgaagaggcttttggtagtatttagatgggttgtgctatccataggtaaaaattctgacctgggggatattacctttatttttcactagatgtaggaaagtagatgctgctctgtttttactccattttgttacattaaaaaaaaattacaatgtagtcctataagtttctttttttattttatccagtactattttagactgtgaatattactggaatttctagttctattccctcttctccctctaaaaatcaaaagtgccaaagagtagtagaccttttgtgatatgttctagtcaaaatagctaaaaactagcgctctctctttaaagttcatattcatctagaacatctcacaccttactcttaccactttactcacagtagtttaaaaaataaaactgtaccctgtatatttgttcatttttgtgttttatgtagagtttccattttgtttttactttttttcaagagtgaattttgtaaaacttccagagtagagtaagttacggccattagagtagccctggaggatgagacttatagtggcaatgattatcacaccttgacaacttgggaagggccatgggatgtggatgtggaaaatatataaaaggacattggttcacatttgaacaaagtggaaggaattattagaaaagcacttaacaagggtgctgatctctccccatctgaggtcttctttcttcttttcatctaattttaagcactgatcagtgaattctttctcattattttacataagcaggtatctaaacttataaaaaattgattatttatcttgtcttttagtgcctttttattaatataagttatttggtttttaaattgtgttgccaatgaatgaaggaagtcctgtcaaaagatatacattttacttatcttaaggctaacagccaccatgtccagcctagcaaacattttttttaatgaaagtccaagtagtatggtctctgttaagctactctacttcaactctgtctgtggtagcataaaagcaaccatagataatatggaaacaaatagtcatttgctgtattccaataagactttataaaaacaggtggcaggatgaatttgtcctataggctgtaggttgctgatcctagcataatgtattgattatacattatggtagagccctctgttggttggaagagaggaccagggaaaaaaaagtgaagatgtattagctatacagaactttctagttggtaagacaaaaagcaagaaaattacagtaatatagaatatgtaaaataaaggaggattcagaactgagtaggtaattcttcagagcatgtcaaatgtagattatggtaaagtagaatgtttatggtttaatacatcaagaactatatccttcataaaataaaatgtagctggacatggtggctacatcttagccaccatatttttacatgtacatgtttggtacaggcttatggtggcatgtaattccaacattttgggaggccgaggcaggtggatcacctgagatcaggagttcaagaccagcctggccaacatggcaaaaccccatctctactgaaaatacagaaattagccgggtgtggtggcgtgtgtctgtagtcccagcttctagggagactgaggcatgagaatcgcttgaaccggggaggcagaggttgcagtgagctgagatcatgccactgcactccagcctgggcaacagagtgagaccctgtcttaaaaaaaaaaaaaaagtgaagaacaaggtaagacacatttaatatatctgatcaagtggtcttgtccaaaaaatgtcctgatacatttttttaaactaataaatggaggattgcagacttactgaatatggcaggatcctttagcatgtaatactttaaaatggatccacactgaacttctgctggatgtactggagtaagagtggccagatttatcctccctcctcaaacaatgcaaaaaccagacaaggtatataacataagagtttttagacactagacaatactgggcagtgatccctgagagaaaatgaatgaggcatccctacaatttccatagcattctgcctagatagcttccagtctgtagtctgcaggaaggagatccaaaacagaaagaacccagtggcccaactgaatggagacaaagccaaggtggctagaatttgcatgagacagtgcgagagaagacagagctccacagagatagagcacacacactggatatctgcagagggctccccttgatttttaagccaagtactgaaccacataagtatgctaggaaactacttagggacagggataaagccactggaaaggaataagtggaacatttcctgaactcagataagattaataatagtttatagccccaataatcacagtggaaaagcctctaataaattggacatcttttttagtactcaaaagaatattacatcagttggggacaatattagctctagattaagagctgctctcatctcacctagtaaagcttctaaataagcttgtaaagaatcaagttgtttttgagtaaccaactgaatttcagagtaaagttagggccattagagtagccctgaaaatatataatgagaaacaaaatatttgatatggtttggctgtgtccccatccaaatctcaccttgaattcccacgtgttgtgggacccagtgggaggtaattgaatcatgggagcaagtctttcccatcctattctcatggtagtgtataagtctcatgagatctgatggttttaaaaagaggagttcctggccaggcacggtggctcacacctgtaatcccagcattttgggagtccaaggcaggtggatcacttgaggtcaggaattcaaaaccagcttgaccaacatggtgaaaccccatctctattaaaaatacaaaattagccaggcatggtggcacacgcctgtaatcccagctacttgagaggctgaggcaggagaattgcttgaacccagaaggcagaggttacagtgagctgagatcatgccattgcacttcagcctgggcaacaagagcaaaactccatctaaaaaaaaaaaaaaaaggagttaccctgcacaagctctctctctttgcctgctgtcatccatgtaagatgtgacgtgctcctccttgccttctgccatgattgtgaggcttccccagccacatggaactctaagtccaaataaacctctttcttttgtaaactgcccagtcttgggtatgtctttatcagcagcatgaaaatggactaatacaatattctacacctaaaacataaaattcataatgtctgttatccaatcaaaaattacctttcattacctgagaaaggcattgttaaaaaataaataagtaagccaggcacagtgacaaatgcctgtagtttctagctacttgagaggtggaaacaagaagatagcttgagcccaggattttgaggccagcctgtgcaacacagcaagaccctatctcagtcaatcaataataaatacacacacacacacacacacacacacacacacacgtatatataaccattcatgcgaagaagcaggaaaatacaacccataatgaggagaaatattaatagaaatggatttagaaatgatacagatgttaggattcgttgacaaagatgttaaaacagcatttctaaatatattatgtatttcaagaaggtaaataaaaacataatcctattaaagagtaatgtgggaaatgtaaaaaaagacctaatttctagaaataaaaaataccatgtctgaggtgaaaagttcactgggtaagatgtggcactacagaagaaaagattaaggatcttgaagacatagcaatagcaattgttcaaaatgaaacacctagagggaaaaaaagactggaaaaacaagcagtgtcactgtgagctgtgagacaactttagatgatcaaatatataaagactacggatggggcagggagacagaaaaaatatttgaagacataagggctgaaatttttccaaatttgataataactgtaaacccacaaatccaaaaagctcaacaaaccaaaagcagaagaaacactgaaaagctacaccaaggaacataatcaaattgcataagatcagtaataaagaaaaaaaacttaaagtagctaggtttctaaaaacaacaacaacaacaacaaaaatgcattacatacagagaaacaaagataagaatagcagcagtctcctcaacagaaacaatgcaagctagaccttggaacacagaaggaaagagaatattaacccagaattctagacccagtgaaaatacctttcaaaaacaaaagcagaatactttttcagacgtataaaacctgaaagagttcatcagcaggagaccattcagaaagcctcagatctaaatgctgcctgtaacaattacctgctgtatggccttggacatacttgaatctctctgaaccttcaaattttcatctgtaagataaaaataatgctaatttttaggggtttcgtgagaatccaatgatagaaaggaaaagaactgacattcattgaatgtcttctttataccaaccacgtattatctcattaaaaatggaaataacctgcctgggcaacatggcaaaaccctgtctctacaaaaaaatacaaaaattagctgagcatggtggtgcatacctgtagtgccaactgtttgggaggctgaggtgagcctgggaggttgaggctaaagtaagctgtgatcctgccactgtattccatcctgggcaacagagtgagacccaatctcaaaaaaaaaataaaaaataaaaatggaaataaaattcccaataatagggctactatcctaacatttttcttatgctagcctctttcttcttgttctttaatactaaaaacttgggttgttctgaaagaaattagtctaagtagcttgtctgtcttacgttttgatgaagcactttttcctaacttaatttgttctttagttaccagattaaatatgcttaaaagtgggaatgaacaactctccttgctagaatagacaagtcagttaatcactttgtgaaacagttaagtttcttgtaaactgcactttatttttttgcctgtgttttggctgcttaatttttttcagttatgtttattgaggtataatttatatactgtttatctaatttttattataaacctattggatagaggcatgagtgtctttatagctgtgcattgccccatagagtttttggcactcaataaaatgttaaataatatttttattcagcattctgtagacgggaagcatatggtaacaaatgtcagagcacaggttgaaaatctccaaaaagttatatgatatattctttggaaaagctagtagagatacttttgtgaatgaaatttctcttaaaaggggttcccagactcacattttatgcaacaaatttctccagccttcagttactttatttacaaattaaagtttttccttatcagaaataatgcataagttaaaatagtataatactaacgtggtatcataagaaagtatataaatggtttgatagataacataaagtaaaggtaactcatagtttgaaggacagcatgagaaaatatttagaagctttagcagtataagtctttatgttgtgatatattgtatgaaaagaaatacacagtggatagttctttattgttaaatttcagcatgacttagttatgtcactgctacagctgttgcagacattctagtggtaggagactttgactcaatattgtttttctcacctgaggattctagcactatttaatactcttattttagtgtcagaaacaatcattgcttcagaataacagaagacattgtgaattaaaacttcaaataaatttcatgcaaaggataatatctcccggttaatctgtgttgaagaaatggttgaccataatcaggtatacaaagccatttagatagcatatatctaaattttctttccagaatttgcttaccctctgatttgctgaccacacttgctttgaagttttggtttttgttgtcttgctatgttgcccaggcatgtctcaaattcctggacacaagcaatcctcccacctcagcctcccaaaatgttgggattacaggcatgagccactgcacctggccactttgaagtttttattaacataatttgaatgtgaaattacctgagtttttcttgttaacctcatgtataaaatgtgggatagggaatccaggcactgcttacttagcttggtgcctctggctctcataagacttttaataaaggtgtcaaccaggtttgtagtcatcttgctgctcagctaggggaggatcttcttccaagcccactcatgtccggtcacagccctcagatcctcactggttattgatcatgcaccactccatagtcctcacaacattgcaacttatttctcctagagcgagggctcagagagagaaggcttgtgatcaagaagatgaacaaaacataccatcacttttgtcatatatttgttaaagcaagtcactaggtctagagcacattcaaggggaggagaatgtacaaggatttgaataccaggttcaaggatcattgaaaaccattttgaagactgcctcctacacatataatccacagatgggacagatcattaaagtactctaggtgctctgacactcatttgtttatcctgagatcttaacaagaacttgaattcaataggcaaaatgatttcagtttcacataaagtatttcatttattcctagcaacaatgcaacgaaataggtatggttaaccccaatgttattgatgaagaaattgatgtactgagtgactggctcaagattacatagcaaataatttgtaaaactgggaccttagtgtaggccttttgattctagaccctgtactctttccattggctataattgcttcctaccagtactatgttgcacttaaagccattcaaggagaatattatacctctaaatttatatacaattatatgaatttttattatacagagatttttatacatatatgtagagaaagacagacacccccctgtcttaatctctaacctataccactccgtttaggagttatagtattattgagtcaaagtctaatatcattataaggcctgtaacagctgtagcaatgacacacatgtacacagatgctagcagcctaaaactacacttaggaggtaaatgtttgttgcatggagagatgaagaagcaaagtaagaaaacagacctggtctggtggctccattcccccttggcttgtcagtatacagaaatcattgtgtttctatataactagtaacaaataattggaattgcagtgagtatgggcaagttatggttttagtttaatattgattatagataattctactttataagtaagaacttgtgttatcagatgaaatatagagaaagttttctcctccatagttgtctttcatatacgcaaacatgcacttgagtttctttcctttcctgcataatctgaggattgtgctttttaatagtggcttgctgatccctttaaatagctcttaatgtaagtattccatagttttcattaatctgattaacatagtttttccctaacctccattcaaaaactatatttggttgttgttttaccctggttgctgaagcagcaagcctactgcaaaacctaagtggtgtggtatagatgagagtctaagactttaattatatgtcattttattcacaacactcaattccaggaaggaaaaaatgggtctgtttttgtaaaggacatattatgtgagtatcattcattgtaaaccaaaaatgatactgtattatagcatagacaacaatgagaactgattctgaaaatgtgacctgactgagaaactgagtaatagtgaaagttatcaaaatggaaaaaaagcgttaatgtgaaatccagccttctcagaaatactctttcctggcctgtttagttttgcttttgttgcttgtcatgcatgaatgaaagtgctgtactctcaggggagcaggaaagcctctgtgtcggttgtttatttccttaatccctcctcctttgtgatttttgatgtcagatctaaaatggaaagcctgtaaatataatgattatcacacggataatcacctgcattaggaaccgccctgcttttctattctaacccgagctgttctccacatgtcacatccactctgtggttggattttaacctgactgcttcattagatttgtgaaactcagtacgaggcgccctggggcagcacagatggggacttgcttgttttcttttctcacttttactgcaaaggcacactaaaaagtccttttcaatttagtgcgatcagttcacttggaattatctctgatatttggaacctgtcttgctcttctgcccaccaactatgcctattctttcttccttactttctgacctaatgtcttttctttctgcctctgcatgtcatgaatctgacaactaaaattctgcttacaattcttactgggtcaaactgttcccccgtgttgttttgtttgttttgctgacagggaaaaataaatgttgttccatcattgtacctacaaacaccttcagatcagaggttagctgtgggaaagtctgcagtgatatgagccagctgccttctctaatggagtgacttggggcaccagtccaagatcagaggaaggtgggaggaagtcagaagataagatcattttaagccacagaacaacaagcttagcttttctagtgatagggcacagctcagcaaacctgtgtgagggggcactaagacaaaaaattgagttgactttttttaagtacatctttcctcagtcagaaatatgttgatgcttgaaatagtttacagacatggaagtgtcctagggcctggtttccttaaaagataatgatttgacatttatatatgtgtcttcttgcagttagtcagctccataccataacagatcacagttaatttttaaaaataatttttttgggctgggcatagtaactcatacctgtaatcccagaactttggaaggccaaggcaggtggatcacctgaggtcaggagttcgagaccagcctgatcaatatggtgaaacccccatctctgctaaaaatacaaaattagctgggcatggtggcacacacctgtagttccagctactcgggaggctgaggcaggagaatacctttaacccaggaggcggaggttgcaatgagctgagatcgcaccactgcactccagccagggctacaagagcaaagctctgtctcaaaaaaaaaaaaaaatatatatgtatatatatacacacacacatatttatatacacatatatatacatatacacacacataaattttttacagttaatttcttatatttgagcaaaactggacattaaaaaaattttactgtatgtgaattttgagcatttatggcttagtgcaattttagtcctacacattcttcctttgaactttgtcttacagtcccctggggttctctcatgtctctgatgaagttccatataaataagtggttctagtatagcttttttgttgtctttttcatataagaatttgcttggttcagagtgacagcttgggaagcactacatcaatagcttttgaaccttttcctattccttgatatcaccgccagcaaatgttactgactatgtgatgtacaaagttctaaccttgcttgcacaaattgaccagttgtcaagatcaatatttatttgcttatttttgtctacatgaactaagggtaacttggtcaggcttatgtttctctagtaaatagcgtaaggagttgtactttcaacttaacacttcctgttgacttcagtgtttagctgtaatcatacattttgacctttctaaatcctcaaaatggttctctaacctatatgttattagtacattggaccataggtgcatacatgtatttttttcccaatgttttcccaaatttctgctgaagacactgactgtactttctgccttacatggcttgatgctacagtcgttttagttgagttggatctgctcactactcaggctcaaatcccatccttctattaatatctcttggcaaagataattttggaagaatgtgagttaagatgtagagactcttgacagttgtctgcagttttttttttttttcattttcaagagggaagtagagttgaaaagtaatattgcctcccttttctatctgtcctaaaattaaagtataagcacaaagagtgaagaaagggaaaggatttgattacacatatgtatttttgtcatttagtaacctgttataagagccttagggtatataataatcattagattgtgtccttaagatatttaaaatctagaagaactttgcatattaaaattttttaaccatacatatttttaatgctcaactgtttttaccctgtcatcttatattaaagaggatttttggactgtttattataaaaaatttcaaacaaaaaaggagacattggacccctacatagcacatacatctagatttaacacttgttaacattttgccacttttgcttcattttaatttttttctgcagtattctaaaataaattacatatatcatgacatttcatttctaaatacctcaggattcatcttaagaattaaggacttttaaaatcaaactgataattcctaatattacctaattttcatttcagattcaaatttctccccttgtcccaaaaatgtcttttatagctggtttgtataaaccaattaaggtttatacattgttcttggtcattttcccttttctactttacattacattgacttgttaaaaacattaagctagttgtcctacagaatgtcctaccctatgaatgttttcagttgctttctctgtgtatactttaacttgttcccctatcctctgtatttcttatagactgcaagttactggactaaagttttgattaattcatattaaagtatttaggttagaatactttataggtgatggtgtgaacttcacactgcatcacaacagaaggcaaagaatatttggtgatcccactattagtgatgataagtgatagcatcgatcactgggttaaagtgatgacagcttgatccttccattataaagttatgctttgctcccgtgaccagcatataatctgagatactttgattccatggaaatacccagttccctatcatcctttttacccaatgagtttaacatctactgaggatccttgcctgcataaatttcgttatgaggattgcaaaaagatgatttttctgaatttatacatttattagcaggcattcttctctacataagagctttttgagaggtattgttttaattaaaaacacaaccaccagcatattccttggattgtctttctttgctgaggtcagaacacctgaactcactgtggcagctacagtaaaaacatgtactacatcttctttattccaacttgtgaagtgtgttgacattaggctgcctttttttattattattattccaagggaaaaaagaaatctttattgctgtaagaataaaaattgaactatgtgggtatattgagataattgtgtaaagaagaagactgaatgagtttcaaaaaatggattatttcttcattaccgagcactttataattaactgttcttttttttttttatttcaggaagctgccacttttgctagagagcaaggctttgaggtgagttaacccacaattgcacactaaacagatcctaaaggttttttctagctgataatgaagttcttttggacagtgattgatgtgctattatactctcagagcctcgcagcagttgccatggaaacttggcagtcgtcatggtttctttgttctgccagcacagtgttatgacgcactctgctaggtctgcacccaacatcgcctacagatgttatttattgaattttgaaaagcctcttgggaagccaagaggttgggcacggtttcaagctgcctctgcagatatggggcctgtcagtttgttcagttaaaaagctacctcattagctgcattacatttcataaggattcactgctaaagcagtggtggaacaagactaaataatgaaatataatgtcgtttaaataatttcagccctatcacatgtagattatcattatgcaaattaatttctaaaaggttgtacttaacagttgttaggaactgattaatttaaatcctgcttttataaacttactctttgaacctatcttttcttctctctccctctttttttctggggagacggaggtagcataaaatatacatacattttctgaaataaaatatcaataattggatttaatttctaggtcctaattctgtttttctgatataagtgttatcctgtcaagattcaaaactccatgtggttgttgttggcaaaactgagataaccgtgttttttatctgtataatacccctcttccaactgattgttagaaaacactgactaatatgaacccaggttaactgacagagaattaactaagttggagttgtttatgactatgatatttattgagtgaactatgtagaatgctgtgttcttacagcaacttaaagtgttacagggtagtaatttttaaaaatttaatctaaccacagccgaaatgtaggaactttctttttatttgcatattcagtattgtctatcaaacagggaagaggtgagtggtgattgaatagtatcagtaaggactagtaagctcactttgaactctagagaaagatattatatgagtttgtgaaactctttttaaatgtagtaaaggcagattatcaagcagcaaagtaatacatgttcatgttattcatgtcatcagacttgacaaacgagacatagagcttcctcttcatagaggaaagacaaggaacatgtgatacagatattctgttctgaagatcctataaaagaactactccagagtagggaaacttgcttctttgtactcaattattaggagctgtgatagtttcttacaagtttgcttttttatgctttaccatattatagtaaatctaggtttaagtcacatttagaaaaaggatttccaagtggtgggtttttttctaatttaagtttcacattttaatttcccaaactggcaattatatgtaggacaaaatgtaatcatgggaatattcaattaaaaagtcaaatgttttgatcatgagaatataaataaaaattttcaggaattttttaaagttttactgattttaagttttaatattacaaaaattatattatctgttgatacatcagaattctccatagaagaaaactttcagaacatacatttgtatcctgtcagtttactgtgttaccataaaaaatgtatttttggttctataaaataaccaattttgcagatacttagaaatataatttgttatataacatgatcatgatcctgtagtatctacatagcagtttttaaaaaatagtttattaagcctgattaatacttttatttcccccttgagctacttgcttttcatgtgcctggtttacattcagtcatagcaacaaactactttttctattttccattaactagcactatattcacctttccattagttcttacttactgattcttgaattgtttttgccataaatctgccataattgattacagcatataagcaaaatgataatgattataatcacataccttattacctcctgacatagcaaaactgctctgtcagtgatattgacagtgatatgttagactaaataaagcacatagtgtcttgatgtgtctcttcgtagattcccaaaaccatcacaagcattgcagaatatatttgaaccatgagtagggtaccctcaaatagatatttttaatcaaatgtaatccatgtatggaacactatctagagaaattcaatgattttataatgtcactaaagtttcctaggtcattagacagaaatggcagagcataggtttgaaacttggtattcttaaggaataaaacaaaaataaatcactttatcttaatagttttctgtgtgaaaatgcattaatactcttggctagtgtgacaaactagacaaaaatctgcattttatcccttctaactttaattttgactctaaatttggagcatgaatgagaagaaagaagtgaaaagattaaaagaaaggaaaggtgagtattttttccttccatcagtgccgctgtcctaccctcattttctcctataaatcccaatcagttccaaaagccactgagtattgccactagtgatctggctgctgacagaccaatccaagcgcctctaaaaataaccagtgtttattcgtcaggaaatattctcagtggcattttttttttaattgattattattctggttagcttctctgcaaattttacttttgtaaaaaaaaaaatctttaaactgaattcggcagttttcagtgagaagcagcagcttaggagagcactggagaatgagataaaaactggagctgggcagaacacaaagcataagagaggatttttttatatatataggtgatggaaaattgcatagtgcctgatttaaatgacagacctgctaagaatttaaaatgacaattcttggggtaaaaagttttataaggccttttattattctagaaaatcagttcagactggagtgtgtttttaaatctagcttttcttgagccgaactgattaaatgttcgtatttttagaacataaataaaaataaggtgctcaaaagcatgtttcattataaagccttttttaaactattgaaaattgatttaaataaagtgaagaaaatacctcaaaacctaaatatatatattctctatcttttcattgtctctgcaactgagtaaatgacaaatgatgaagagaattcataccttctctattggatcatttatttccttttactccaagtaataaattttagattttttttaaattttagatctctaagaataatacttctgctcataggggaaacaaagcaatccttttcgcctttttcacttcctccatagcccctgactacccagaagatcctagacttgtagtctttctctgaccaatgaggattctttcatcttacaccactgaaagagaaaagtatggaattgtgctatccaatacagcatctactagccacatgtggctatttaaattaggattaattaaaattaaataaaatttaaaattcatcacttcttggccttttggctaagatcaaatgtaaaattttaaattcagtccttcagtcatactaggcacatattgagtactctatagactatgtagctaatgactactttattggataatgcaggatagaacatatgcatcatcacagaaagtttcattgatcagcatggatagaaagtctacagagaatgtattcaggcagtgttgattaccaaagaattaccttaggtgacttttaggttcctgtgttcttcacaaatataaatagtgcaatgaatgatcactcagagtttcagagtttctgaaaataagaccctaaatcaggccctgctggctaagagagtgcagtgttgtttttgtaggtgcctgaaccccaaaagaggacaattttagaacagttcagttaagggaaagcaataagctagtcttctaattctcttcatttaatcatttatttattcaacaaatatttactgagttcttactatgtacataccactttgatagaccccaagacaaggtggaagtgaccagagagtgtaccatgaaagagcatgtgggaagggttcccattttagctatgatggctatggaatgaccctaaaaatatgaatatctagcaatgacaaaaaaaaagcgacacaaacagcaaaacaaatttcaaacagagagaacaggactataaaagtctctgaacgagagagaacttaatgtactatgtactccaggaactgacagaaggccagtgtgactggaatggagttagtggggacagcatatgagatcaatctggcactgacacatcatataaacagcataactattaaaggagtttctatttggaaaacaaaacaaaatggtatggctagatgactcaatgtgtggaaacactacagttggttttctacagaactaggtagactgtgacaggattgcttaacctttgtataaccagctggttaaaaatagaataaagattttctttatccagtctatcattgatgggcatttgggttggttccaagcctttgctattgtgaatagtgctgcagcaaacatatatgggcatgtgtctttatatcagaatgatttataatcctatgggtatatatccagtaatggtattgctgggtcaaatggtatttcttgttctagatcctttaggaatccagttcatgttctttgcatggacatggatgaagctagaaactatcattctcagcaaactaacacaggaacagaaagccaaacactgcatgttctcactcgtaagtgggaattgaacaatgagaacacatggacacagggagggcaacatcatacaccggggcctgttgtggggtggggggttggggagggatatcatcaggagaaataactaatgtagatgacaggttgatggctgcagcaaaccaccatggcacgcgtatacctctgtaacaaagctgcatgttctgcacaggtatcccagaaattaaagtatgattaaaaaaaatttctagtaatagtaacactactagtaattcaaatgaagtgtgtgtaacagaagaaataaaaaaaaaattaaaatgctacatctgaaaatacctatttcatacaaagcaaggaggtaaagaagggatagaacatatttttttaaaatatgacatatggaaaacaaatagcaaatggcagatattaattcaactgcattaataataatgttaatctggagtaaataatatgataaaaaggcagaaattctcagactagataaaaaaactgaggtctaactatatgctgtctgaaagagatgtatcttcaattcaaagatacaaataggtaaaaaaaaaaaaaaagaatgaagagagtatgttctttgatttggaagacaatgtgatcaccaatgacaataaaaccatatttctacatttataaaatgctcacagtttataaaacctttcccaacatatcagtaatacattcatacttgcacaaaccttgagagataggtagggcatgtattgccatatcagttcaacagattaaaaaaataggctatatggccgggtgtggtggctcccacgcctgtaatcccagcactttgggaggccaaggtgggtggatcacctgacatcaggagttcgagaccagcctggccaacatggtgaaaccccatctccccttaaaatacaaaaaaatagccaggtatggtggcagatgcctataatcccagctacttgggaggctgaggcaggagaattgcttgaaccaggatgtggaggttgcagtgagctgaaattgcaccattgcacaccagcctgggcaacaagagccaaactccatctcaaaaaaaaaaaaaaaaaaaaaggctctatgactttttcaaagtcatatagctaatacattatgtagccagaaccagagctcagctctctatgtctggtgctctttactataaagcacacagctttctctcacacattctaacatgttggaagaggagattagatttcaaaatgactttgagaaatgaaaaatacctttttttttttttttttttttggggagggggtttggctttgtcacgccaggctggagtgcagtggcgtgatctttgctcactgcaagctccgcctcccgggttcactccattctcctgcctcagcctcccgagtagctgggactacaggcccccgccaccacatccggctaattttttgtatttttagtagagacggggtttcactgtgttaaccaggatggtctcgatttcctgacctcatgatccgcccgcctccgtctcccaaagtggtgggattacaagcgtgagctaccgcgcccatcgccatatcagttcaacagattaaaaaaataggctatatggccgggtgtggtggctcccacgcctgtaatcccagcactttgggaggccaaggtgggtggatcacctgaggtcaggagttcgagaccagcctggccaacatggtgaaaccccgtctctactaaaaatacaaaaattagttgggtgtggtggcgggcacctgtaatcccagctactcagaagcctgaggcaggagaatcacttgaacccaggaggcagaggttgcagtgagccaagatcgcaccattgcactccagcctgggcaacaagagcgaaattccatctcaaaaaaaaaaaaaaaaaaaccactgaaattcgctggagtaaaaatatgagccaaattaattaagaaaaaatagcaaacttaaacacaagatcaggaatgacttgtgaatgtggtaggaaaatggtttaggatgaacatgctatagttttgtgataaaaaaaaacaacaaaaagcacattgctagcatttatagaagcactataataatggttaagtgtattatccttggagtcagactgtgggtgctagtctgttctccactacttgtatttatgaccttaggcacattacttaacgtctctgactcagtttcttcatctataaaatggcatattgtattagtacctactgcctagagtagttcagatttaatgagtactttattttattgattggttgattgattgttttgagacagcctcactctgttgccctgactgaaatgcaatgatacggtctcagctcactgcaacctctgcctgctgggctcaagcaatctgtagattcaatgcaatccctatcaaaattccaatgtcattctctctctctctctcttttttttttttgagacagggtctggctctgttgcccacgctggagtgcagtggcgtgatctcagctccctgaaacctctgtctcccaggctcaagccatcctcccacctcagcctcctaagtagctgggactataggcgcatgccaccacacctagcaaatttttgtatttttttgtagagatgaagttttactacgttgcccaggctagtctcaaactcctaggctcaagcgattcacccgcctccgcctcccagtgtgctgggattacaggcatgagccaccacgccttaccttaatgaatactttagagctttatacatggcttttagtttcttcatctataaaatagggataataatagtacctactgactagagaagttaagatttaatgagcactttagagctatgtacatggctcacagctcaattttatgagctttcaactcatacttcttactcctccctgtcttcatcttcttcgttatagatactataattgaatgttccatattcaaaactcttgaagccctttctagcgattttggggcaacctaagtatgtaaccattttagagagtattaaaatgagagtaattagaggaaataaattaatatttaagttcttagcatgtgctaaaattgcattaagctatttcacttacctcatcttctttcatcctcacaatttttaactttttattttaaaataactttagtcttagaaaaattacaaaaatagtacagaattcccacatacccttcacccagtttaccctaatattaacatcttacataaccaaagtataatgaataacagaaaattaacattaaactacaataactgaactatatacaggctttattctggtttcaaccgttttttctctagtttcctttttctgttccagaatcgaatcccacattgcatatttgtcatgtctccttagtctcttctaatctgtgacagttcctcactcttgttgttcatgaactttatacttttgaaaattattggtcagtcattttgtagaatgtccttccatttgagtttgtctgatgttttctcatgtacattgagattaggcatttttggcaggaaaaccacagaagtgatgttcctttcttggtgcatcatatcagggaggtacacagtgtcacagattcttattgctggtgatgctaaacctttatcactaggtttaggtggtgtttgctagtttatcctctgtaattcccattgtatttaataaatatcttggaggagatactactttggggctatggaaacattctattttatccactaattttagcatcactaaactaatctatctggcttaaggtgatgtctgtcaattttctctactataacattatgatttttccttttgtaatgaatatcttagggggacatactttgagactgtaaatatcctgttttctttaatttttgcccactaatcttagcatacttatccctcaaaatcttttaatgtgaacattttcttagttttgtagatgaggaaatggatcttagagaggtttattaacttgccccaaatcatacaaatagtaaatccaagcctgtcatattctaaaagtccttgtaatttcattgtttgttaagatgtgtgagcttaagtgtaagggagaagaacctattggggacagaggagaggaattactgtagaaggagaaataaagttttacatacatctgggaagaattatgttttgtacttggaaagtttattttgtcctttaattgccattttatgaggtttaatttgagacataagaaacatttctttgattaaattaccaaagctctcaacaaaatatgtcttctcacagggttggtagaaagcaaccatggaatcttattcctttttttttttttttttttttttttttgagatggcgtcttgctctgtcaccaggctgcagtgcagtggcatgatctctgcacactgcaacctctgcctcctgggttcaagcgattctcctgcctcagccctcccaagtagctaggactacagacacgtgccaccatgcccaactaatttttgtatttttagtaaagacgggatttcaccatgttagccaggatggtcttcatctctcgacctcgtgatctgccctcctcggcctcccaaagtgctgggattacaggcgtgagccactataaccagccagaatcttattcttaatttattccttatatcaccttgaagaaagactttcttttaaagaacatctagtacattcataagattctgctttcaagatgatgaagtgaatgtgtttttctcttatctttattaaatatgagctgtacttaatcacaagcaaaaatcctatagtagtaaaatatatttgtgctaaggaaattgccaaaatatacatgagtcattttaattatatgtgtacacttatttaggtgagtgaagacattgcatggcattttttggtcctttcagctgttactagtcatttctaaaagtctgtctcctgaaactgagggaatttcttctcatcttatcagagttcagacttagttctgttctaaaataagcaaccgaaagcgaaatagtcagcatgtttgaagtcagcagcactgtcctactacaaatggctattcttttcagaaacaactgtcctctagaagtcatcctgttaggtatattagaagcttagcttcatatattatctggaatttattaaatattgagtgaacaaacaatataaaaatatttcaccactaattgtcatccctttaaaaatgccagtttctggtgacgtttgtaacgattgcaaaccattgtgacttgtctgctttgcttgcctaaatgttctctctcatatattctatttgttctcttatatatactttatttatgccactcagctatatttccgctctgataggtgtttctttctctataactatttgaaactttgcatagtgatagaataaactagttttgttagcaaagcccaaaactatggacagttttaaaagcccactgaatacagacatggattttcaaattatccaaaatggttgaaaagatgattctaaaacctctgcctttagctcaaggttaggtttcaagatttcagaaaacttcaataaagatttcagtaaaactttatggcctatgtggtgtgaaaaacagcatcagagtttgacaattagtttgtcattttttaaactttatcttttttaaagaaaattaagtctttgtaggaaaggattagcatttctttctctcaaatcagtcctttgaaaaattgacattataagaactgtattttttccaaagtcagcataattatgttctgtaaacctctaaaataattaaattttcctctttataaaaacctctctttaattgggaatttgaaaactgcctggatatttgctgatacttagtcattgttaataatttttgaagtatgataatagttttgtggttatgtttatcattacctttcaaagatatatactaaaacatttatagatgaaattatgtatagttcttggagtttactttagaataatttgaaaagcaagtggatgaggatataggtgaaataagattcatcatacattttaaatttgtgtagatcattgatgggttccttggaagtcactgtgctattctatttacttttgtatatggttaaagaaatttttaatgtctcttaatagatatgcaggtctcttattttgatcaatagaagctaaattgttaatctactaataaagttttgttttattttattggtcatgagaattttttccttccttctattaatagactaaagacattaaagagatagccaaaaagacacaagccctgccaaagatgaactcaaagaggcagcgaatcgtgatcttcacccaagggagagatgacactataatggctacaggtacatgtgggaaatgtgtgatgaatctagtattatggagattaatcaattacaaaaaaaaattctgtattctttctattataatatatacaatatacatatacaatatatataaaatgaaatattttattttaataaatatttctaccctgtatctcagtagaaaagatttcatgttcaagaagatagtttattaacatttagttaaataaaccactttgatataatttatttacttagttatcttggggattttgtcaatcaagaaatatctttcctgaaaaaaagaatacatttcatttataaaatacctgcactagagtaaaataaatttactcaattatgaacaaataaaatccagaactaagttacattttccatttttccttcaagaagaaaatctcattttttgttttatttcaccatctattttatagcactcataaaacaggaatttcatctagtaagcaaacatgttattgattaaaatgattaatagtgttaatatggagctacccactattaaaaatataaatgttttaattctgtctgtaccattcagattaaaaccaatcagttgattagttattgtaaactggagcaatttagtattacctatgtgtttgttcagtactctgctgaacactgaaatataaaataggaaccttaaagatctaactgggaattaatattcataaaatataagtacaaagtaaaatataattatagttcttatctattggtgctaactatatggattgtattgactcaggagatcagtaaatcttgaaaaaagatgttatagtgaatatgaagtacatttgtgttgaattaaatataaagcctgaaataggccaaagatgaaattactgtcaagatattttctttcttttttaaaataaattttattctttatatttgaggtttataacatgatgttataggatacatagatatatatagatcaactttcttatttcagaatggtcaaaagcaagattcagagatttgtttcaaaaaatatttgcttcaaagtagttcagtgagtggtagataaagtgagggtataaatgaaatgagactggtaatgaattaattgttgaagctagacagtggatatatgggggcatcattatgctattatctccacttgtggatatgttttaaattatccataattaaaactttaaaaaaagaaagaaaagtttttttttttaaatttcaaacaagattcagagatgttgagtggctttcccaagatacattgatatccttgctaatccttaaattctaggaaggattaaaagaaaggaggacaagtgggcacagtggctcacacctgtaaccctagcaccttgggaagtcaaggtgggaggattgcttgatcccaggagttggagaccagccttggtaacagcaagacttcatctctacaaaaaaaaatggaaaaaaaaaaaaaattagctgagagagtagtggcacatgcccatagtcctggctacttgggaggctgatgcaagaagatcacttgagcccagaagttcgaggctgtgttgagctatgatctctccactgcaccccagcatggatgacagaccaagaccctgtctccaaaaaaaaaaaaaaaaaaaaaaaagaacggagggcaatggagtcaaagaggatcaagtaagcaaaggcacaagtactagcaatcttttattgtgatggcaagaagaaccaccttgttaatttgtacaagagagaaaagaaaccatgaaaagatatccctgcactgatacaaactatctgaattgctttcttcctatagtataaggattattcctgtcttagcagtggacagtttagaaaagtgaaaaacatacaggcttcttataggaattgtagtactaccttcagatttacaaaatattctttggttgctctttgtggagacattcattttaagtctttgtatattctagatatacatactgtacaagtgtcttccttattgtgaatttgcagttttcccaaaattgaaaattaacctccccattctgtgactgtatttccttgtgaactcattttattctttattaaatctattaagccattcttaggaatgcttacaagctggaatttatttgaggaaagacactggctaatctttgctgttcctaccatatgaaaatgaacttaaatcaaaggatgcactatatctgcaatgcatgataaatacaagatggatagagaatctgttcagtggtgtcagctacaaaagcaaacatgataaatgttaatgcagttttgagccctgggataagctattcagtgcacaagtgtagctgaatctctttgctatgttgttattcattgcagccaaataaatgtcaataataaaagagaattaaagattttcatttcccagaggcagtcctctaatacggcttgatctttcatttcatttgtaattcgttctcatgtcaggatgcaatcattcgccaggctctgggtgtcatgttaagccatttaataatgattaagaacataaaaatgcttggcctgtggggcaattcacaaaagagatgccaatttgttattgttttccctcctttcctcttgaatatggatcagctttttcccacctcctagcattaaaatactaatggaagatagggagggaaagtgtcccttaatttaccataagtgacattccagaatggcacaaggcagtgctaacacacatattaaaagactaattaggaatcattgtgccttaaacctatttttttttaatgatactttaagttctgggatacatgtccagaatgtgcatgtttgttacatagttatacacatgccatggtggtttcctgcacctatcaacccatcatctacattaggcatttctcctaatgctatccctccctgagctcccccaccccccgacaggccctggtgtgtgatgttgccctccttgtgtccgtgtgttctcattgttcaattcccacttatgagtgagaacatgcagtgtttggttttctgttcctgtgttagtttgctgagaatgatggtttccagcttcatccatgtccctgcaaaggacgtgaattcatccttgttatggctgcatagtattccatggtgtatatgtgccacattttctttagccagtctatcattgatgggcatttgggttgactttgctattgtgaatagtgctgcaataaacatatgtgtgtatgtgtctttatagtagaatgatttataatcctttgggtatatacccagtaatgagattgctggatcaaatggtatttcctgttctagatccttgaggaatcgccacactgttttccacaatggttgaactaatttacacttccaccaacagtgtaaaagcattcctgttcctccacatcctcaccagcatttgttgttttatgactttttaatgatcaccattctaactgacatgagatggtatctcattgtggttttgatttgcatttctctaatgaccagggatgatgagctttttttcatgtgtttgttggccgcataaatatctccttttgagaagtgtctgttcatatcctttgcccactttttgatgtggttgtttgttcgttttttgtaaatttgtttaagttctttgtagattctggatattagccctttgtcagatggacagattgcaaaaattttctcccattctgtaggttgcccgttcactctgatgatagtttcatttgctgtgcagaagctctttagtttaattggatcccatttgtcagttttgacttttgttcccattacttttggtgttttagtcatgaagtctttgcccatgcctatgtcctgaatggtattacctaggttttcttctagggtttttatggttttatgttttatgttttaagtctttaatccatcttgagttaatttttgtataaggtgtaaggaaggggtccagtttcagttttctctatatggctagtcagttttcccagcaccatttattaaatagggattcttttcccccattgcttgttttttgtcagatttgtcaaagatcagatcgttgtagatgtgtggcattatttctgaggcctctgttctgttccattgatctatatatctgttttcataccagtaccatgctgttttggttactgtaggcttatagtatagtttgaagtcaggttagcatgatgcctccagctttgttctttttgcttaggattgtcttggctatacgggctcttttttggttccatatgaaatttaattttctctaattctgtgaagaaagtcaatggtagcttgatggggaaagcattgaatctgtaaattactttgggtagtatgaccattttcacgatattcttcctatccgtgagcatggaatggttttccatttgtttgtgtcctctcttatttccttgagcaatggtttgtagttcttgaagaggtccttcacatcccttgtaagttgtattcctaggtattttattctctttgtagcaattgtgaatgagagttcactcatgatttggctctctgtttgtctattattggtgtataggaatgcttgtgatttttgcacattgattttgtatcctgagactttgctgaagttgcttatcagcttaaggagattttgggctgagatgctggggttttctaaatatacagtcatgtcatctgcagacagagacaatttgacttcctctcttcctatttgaataccctttatttctttctcttgcctgattgccctggtcagaacttccaataccatgttgaataggagtggcgagagagtgcatccttgtcttgtgccggttttcaaaggcaatccttccagcttttgcccattcagcgtgatattggctgtgggtttgtcataaatagttcgtattattttaagatatgttccatcaatacctagttttttgagagtttttagcatgacggagtgttgaattttatcgaaggccttttctgcatctattgaggtaatcatgtggcttttgttattggttctgtttatgtgatggattacgtttcttaatttgcgtatgttgaaccagccttgcatcccagggatgaagccgacttgatcatgatagataagctttttgatgtgcttctggattcagtttgccagaattttattgaggacttttgcatcaatgttcatcagggatattggcctgaaattttctttttttgttgtctctgccaggttttgctgtcaggatgatgctggcctcataaaataaattagagaggagtccctctttttctattgtttggaatagtttcagaaggaatagtaccagctcctctttgtacctctgatagaattcagttgtgaatccgtctgctcctgggctttttttggttgataggctattaattactgcctcaatttcagaacttgttattggtctatttagggattcaacttcttcctggtttagtcttgggagggtgtatgtgtccagtaatgtatccatttcttctagattttctagtttatttgtgtagagatgtttataatatccactgatggtagtttatatttctgtgggatcagtggtgatctcccctttatcattttttattgtgtctatttgattcttctctcttttcttctttattagtctagctagcagtctatctattttgttaatctttgcaaaaaaccagctcctggattcattgatttttggaagggttttttgtgtctaactccttcacctctgctctgatcttagttatttcttgccttctgctagcttttgaatgtgtttgctcttgcttctctagttcttttaattgtgatgttaggatgtcgattttagatctttcccgctttctcctgtgggcatttagtgctataaatgtccttcttaacactgctttagctgtgtcccagagattcgttgggtctctgttctcattggttttaaagaacttatttatttctgccttaatttcattatttacccagtagtcattcaggagcagattgttcagtttccatgcagttgtgtggttctgagtgagtttcttagtcctgagttctaatgtgattgcactgtggtctgagagactgtttgttatgatttccattattttgcatgtgctgaggagtgttttacttccaattatgtggtcaattttagaataagcgtgatgtggtgctgagaagaatgtatattctgttgatttggggtggagagttctgtagatgtctattaggtctgcttggccagagctgagttcaagtcctgaatatcgttgttaatttttggtctcgttgatctaatattgacagtggggtgttaaaatctcccactattattgtgtgggagtctaggtctctttgtaggtctctaagaacttgctttatgaatctgggtgctcctgtattgggtgcatatatatttaggatagttagctcttcttgttgaattgatccctttaccattatgtaatgcccttgtttgtcttttttgatctttgttggtttaaagtctgttttatcggagactaggattacaacccctgctttttttttgctttccacttgctttgtaaatattcctccatccctttattttgaacctacgtgtgtctttgcacatgagatgagtctcctgaatatagcacaccaatgggccttgactctttatccaattccccagtctgtgtttttcaattggggcatttagcccatttacatttaaggttaatatattatgcatgaatttgatcctgtcattatgatgctagctggttattttgcccgttagttgatgtggtttcttcatagtcttgatggtctttacaatttggtatgtttttgcagtggctggtaccagtttttcctttccatatttagtgcttccttcaggagctcttgtaaggcaggcctggtggtgacaaaatctctcagcatttgcttgtctttaaaggattttatttctcctttgcttatgaagcttagtgtggctggatatgaaattctgggttcaaaattcttttctttaagaatgttgaatgttggtcctcactctcttctggcttatagggtttctgcagagagatcagctgttagtctgatgggcttccctttgtgggtaacccaacctttctctctggctgcccttaatactttttccttcatttcaaccttggtgaatctgacaattatgtgttttggggttgctcttctcaaggagtatctttgtggtgttctctgtatttcctgaatttgaatgttggcctgtcttgctagattggggaagctttcttggataatattctgaagagtgttttccaacttggttccattctccccatcactttcaggtacaccaatcaaatgtaggtttggtcttttcatatagtcccatatttcttggaggtttgttagttcctttccattcttttttctctaatcttgtcatgatgctttatttcattaagttgatcttcaatctctgatatcctttcttctgcttgatcaatttggttattatatttgtgtatgcttcacgaagtgttcgttctgtgtttttcagctctatcaggtcatttatgttcttctctaaactggttattctagttagcaattcctctaaccttttttcaaggttcttagcttccttgcattgggttagaacatggtcctttagctcggcggaatttgttattacccaccttctgaagcctacttctgtcaatttgtcaaactagttctctgtgcagttttgttcccttgctggtgaggagttgtgatcctttggaggagaagaggcattctggtttctggaattttcagcctttttgcactggtttttccttatcttcgtggatttatctacctttggtctttgatgctggtgaccttcggatggggtttttgtgtggacatcctttttgttgatgttggtgctattcctttctgtttgttagttttccttctaacagatgcctctgctgcaggtctgctggagttttctggaggtccactccagaccctgtttgcctgggtatcaccagcagaggctgcagaacagcaaagattactgcctgttccttcctctggaagctttgtcccagaggggcacccgccagatgccagctggagctctcctgtatgaggggtctgtcgacccttgctgggaggcatctcccagtcaggaggcatgggggtcagggacccagaggcaatctgtctgttaggagagctcgagcactgtgctgggagatttgctgctctcttcagagctggtaggcaggaaagtttaagtgccgaagctgtgcccacagctgttccttcccccaggtgctctgtcccagagagatgggagttttatctataagcccctgactggggctgctgcctttctttcatagatgccctgcccagagaggaggaatctagagaggcggtctggctacagtggcttttccaagctgcagtgggctccacccagttcaaactttttttgcgaactttgtttgcatctttgtttacactgttaggggaaaaccgcctactcaagcctcggtaatggcagtcgccccttcccccaccaagcttgagcatcccaggtcgacttcagactgctgtgctggcagcgagaatttcaagccagtggatcttagcttgctgggctccgtcggggcaggatccgctgagctagaccacttggctccctggctttatccccctttccaggggagtgaacagttctgtctcgctggcgttccacacgccactgtggtatgaacaaaaactcctgcagctagcttggtgtctgcccaaacagcagcccagttttgtgcttgaaacccagggccctggtggtgtaggtacccgaagaaatctcctggtctgcgagttgtgaagaccatgggaaaagtgtagttatctgggctggagtgcaccatttctcatggcacagtccctcatggcttcccttgactaggggagggagttctcgaccccttgcacttccccggtaaggtgacgccccaccctgcttccgctcgccctttgtgggctgcacccactgtctaatcagtcccaatgagatgagccaggactctcagttggaaatgtagaaattacccgccttctgcgttgatctcgctgggaggtgcagaccggagctgttcctattcagccatcttgccagccacccaaacctatttttaaatgatcacactgttaagtttgcagtacttagcaataatgtatcaaaatgtttccttggagttttattctacagacctatctccttttgagatatgatatacataaactactttgtcttattttataaatttaattctttaaattgcctgtaaatctaaagtattttccgctcaccctgttttatgggtcatacctctttcagattgagtttccatctaccctagaggttctgtcacataccaatcattgtttcagtccttgcaggttaattgagtttcaaaaaaattttcaagggagtgctgggcactgaagaatattaagagtaacaggctgggcaattccacagcagagtatatgtccaaaataattgaagcaggaacctaaacagatatatgcccacccatcttcatagcagcattattcacaataaccaaaaggtagaagcaatcaaagtgtccatcagcagatgaacagataaataaaatgtgatatatacatacaaaggaatattattcagctttaaaaaagaaggaaatcctaacatgcactacaacatggatgaaccttgaagacattatgctaagtgaaataagccagtcacaatgggataattactgtgtgattccatttatgtgacatacctagagtagttagctttatagacaaagtagaatgatgttagccaggggctgggggagggctgaatggaaagttattgtttaattggtaaaaagtttcagttttgcaggatgaaaaagttgtaaagatgggtagtgataattgcacaataatatgaatgtacaatggcactgagctgtatattcaacaatgcttaaaatgttacattttatgtatatttttattttttaagcatatttttcaatttaaaaaaaattaaacataacctaaagagtaagatgctgggggtgaaggcagaaaagatgactgtccattttgatcctctttataaatgttgaatgaatctgttgaataacatggcagtaaggtgaaggaaatcatttctgtgtttataaactggaaaaactaacagtgttctttacctgttggagagcaactactaatgagatcttcatacaataaaaccttattatattaagcatggtagtaaaaaagtaaatatatatatgtatgtaaatacatatatagtgctttatagaaagtttaaacttccccaagtttctatactaaataaatcaccaaaaattggagaaagcaatacaacttttgttctgaattggaaataatgtgtttccaattaaataggtccactgaaaaataaactgtagatttttctgtttcgtttgttttaagaccaggcctcgctctgtcacccaagctggagtacaatgacacaatcatggctcactgcaacctcaaccgggctcaagcgatcctcccttcccagcctcctaagtagccgggactacaggtgcctaccaccctgcccagctaatttttttgtattttttctttggtggagactggattttgccatattgcccatgctagtctcaaactcctgagctcaagtaatctgccttcctaggcctccctcctaaaatgctaggattacgggtgtgagccaccacacctggcctaaattgtagacttttctgaacactcagaattcttatttgaattgtaatttttcacaaagggagaaaatatattaagtcagatgttttcaactggaagactggtgctatcacatcaaaatcacctagtgagtttttggtaaatacagtcctaccttttttttttttttttaattttagaattgggggagggtgtgatactttttcagggttgttacatggatatattacataaggctggggtttgggcttctattgaacccatcacccaaacagtgaatataatacccaataggtagtttttcaactcacccccacccacttcctgcctccccctttatgtccatgtatacccattgtttacctcccacttataagtgagattgtggagcatatggttttctgtttctgggttaattcactttggataatgtcctctggctgcatctatgctgctgcaaaggacattatttccttctttgttatggctgcatagtattacatggtgtatatgtaccacactttctttatccaatccgctgttgatggacacttaggttgattccatgactttgccattatgaatagtgctgtaataaacataagaatgcaggtatctttttgatagaacaatttcttttactttgggtagatacccagtagtggggttgttggattgaatggtaatcctgtttttagttctttgagaaagttccaaactgctttccacaggggccaaactaacttacattcccaccaacagtatgtgtttccttttctctgtatcctcgccaatgtgtaatttttttactttttaataatagctgtgctaactagtattatgatatctcattgtggttttaatttgcatttctctgattattagtgatgtggaacatttttcatatgtttgttggctgcttgtatgttcccatttttaaaaattgtattgatttatttgtattttatagagaaagtgtcttgctatgttgctcaggctggtctcatacttcctgaggctcaagcagttctcctgcctcagccttccaaagtgctgagattacagacatgagtcaccatgcctagctgtatgtcttattttgagaagcatttgttcatgtcccttgcctactttttaatggagtaatttgggtttttcttgttaatttgtttaggttccttatagattctggatattagtcctttattggttgcatagttagcaaatattttctcctaatctgtaggctgtctgtttattttgttgatagttacttttgttgtgcagaaactctttagttaagttacaatggtcaatttttatttttgttgcatttgcttttgaggtcttagtcataaattctttgcctaggcctatgtgcagaatagtttctcctaggttttttctaggatttttatagtttgaggttttatgtgtaagtctttaatctatcttgagttaatttttgtatatggtgagaggtaggggtccaatttcattattctgcatatggctagccagttttcccaatatcatttattgaattgagtgtcctttcatcactatttatttttgttgactttgtttaagatcagttggttgtaggtttgtgggtttacttctgggttctctattttgttccattgatctatgtgtctatttttgtgccaataccattgctattttggttactataccctagtagtatagtttgaagtcaggtaatgtgatgcttctggcttcgttttttgcttaggattgctttggctattcagctaccctgccttcttaaaagcacctttctttcaatctgatacaaccctgtgaggagtattagaaaatacaacttcaaggagatgtttgagaatgcgggcagtacagtctggggcaaggggagtgtaggattatgtatggttgaaaatgttccctttggtgatatagcaatgctgtctatcctccacctgtcactttgagaatcactggattaggtgatttaataatgctgcaagttccgtaatctgctggaaaaacgaaaacagaactttttaacagctaagggtctagttcttcaataactcaggccttgggaaatgcttcttttttcgatccttcaaaatccatccacacttacaggcaatctacagtttactttaaatagtctcctacttttgaggtgcttataatttaacatagttacatcccaatgccctttgtcattttattttaagtaaatggggttattgacgttacttgtcttcatgttcctgagtccttaaagaaacgtgttacctcatctgctagttaagttttcatgttctatgaaaacactcaatgctgcccattactctgtaagaaaaggtcagtgtgatttgcaattctggtagacgtaaagttcagaaaatgtgcgttagaaaatgcaaactctaaaggaaaacaatctcagcattggaagaataatgtcagcacatgatcccaactcaaaatattaatataaatcattttgaaaatgtctctactacagccaaatcaattttaaatgataaccttgttggcttagattggtgatggtaaagatagaataaactaagtggcattcttttaaaatgtcttgtatggcattcatagaaaaaagttcttaccaggtaagatcttagagaaaatatatttctcacctatgaatgtaagttactaagttattagctcatggtccatttttagattattgtaatcacaaaagataaactcctttaattaattggtcaaaaataatttagaataacatgtggacctgtcacatttttgacaaagtagtatctttgggatgtggttcatttagttcagtgatctcaagcctgaagaaatgagacttctttcaactcccacctttttattgaaaaggatcctgctagaaggcaaaataagaggcaacctatcctaagcagatataagccctattatagcactgatttctggagggatgtttaagtcagatttgttgagatatagattacatatagtaaaatccacaaatatgttactaaataacatgtaacaaccaccacagactatagaccaccttgtacagtttgtattgaagtataatgtgcatacaaaattgatacaacttttcattaagtggatggacctgtgtagctataaccagatcaggaaatacaatacttatagcacttaagaagcttctccttgtgccccctcctaatctttatccccactgaaggtaaccattgtcttagcttctactactgacagttagctttgcctgtttttgaaatggaaccactcagtatgtagacttttgtctgctctatctccatccatttttgtgcactttcttactttttgacaacataagatcccccgggctcacgttgtattttctccacttcagtcctataatcaactatttctccaaggaaccctggttccctttattgaagaatggtttttagaaacctgtaactgtgctctagatatgctctttgttccttgagtgtctttgcttctaggccctcttagcaaacagaacttggcaatatatgtatgtataataacctatgtatactcactcatctatatttatttctgtatctatatgtttatatatttttaaaacatgaagtcatactgataaattttatttcagtccagcagcacaaggctcattctagccttcattcttccttttgtacaacttcttcctttgacattgaaaattctggctctcattatctaaaatgtatttacttatttgttttatcctaaagtagttttgaattgcttgcccatacccttgtatgagaaagagatttaccctttagagtataatatttgcttacagttctttttttctgtagcccaatagtgtccagtcaatatatagttatccaaagtaaattagctcttttatttcatccactcattatggttacattattcatttgtaatacaggtagggtcacttgttaagagtattccattttggtttcttttcacatcctgattggggttttattttctcaataaaattcactttttgtagtgtcaagttctgtgggttttgacaaacacataagatcatgtaaccaccaccatagttatgataccaaagagttacatttttcagctccggatttgcaaggatggtaccaatataaactcccccaattttatgagacggcactaattgttccacatctctaccaatatttgctactatccatctttttaattttagccattctggtgagtatgtaatagacctcataatgattttgattggaatttttctgatgtgtagtgagatggagctccttttcatctgcttactggtatttgtttttttgtgtgtagttttgttttgttttgtttttttgagatggagcctcactctgtcgcccaggctggagtgcagtggcgggatctcggctcactgcaatctccacctcctgggttcaagcgattcccttgcctcagcctccctagtagttgggactacaggtgcccaccatcacgcctggctcatttttttatttttagtagtgacggggtttcaccatgttggccaggctggtcttgaactcctgacctcaagtgatccacctgcctcggcctcccaaagtgctggggttacaggcgtgagccatcgtgcctggccttgcttactggcatttggatatcatctttgattgtattgttgttgggttcttttgcccatattgagttgtcttattgatttagaaatctttttacagcctgtatgccagtcttttgttagataaatgtattgtagatatctcctgctactctgtggcttgccttttcactctcttcatggtatcttttgataaacaaaagttcttgattttaatatagggcaattcataatgttttccccttatgattaatgcttcttatattccattaaagaaaatcatggcagatctcaaacttgtgaagatactcttctgttgtttttttctaaaacttctattcttttacttttttcaactagcacaattcatctaagattaatttatatatatatataaggtgtaggatagggagaatgattcatttattttgcccatatgaataaccaattgacctggcatcattcattgacaggaatatcctttccctaactgcattacattgacacctttgtcatgtttcagatgaccttatatgggtgagtctttttttaggctatttcattgtcctcattctctatcctttaccaattgcacactctcatgataacttaggtttataatcagtctttttatctggcaatgtcagtcttctgagtttgttcttcaagattatcctggcttttcttggctctttgcatttctacttaaattctagaactggcctgttaattgtcaccaaaggaattttttaaaaattccttactagagttttttcagattatattgaatctgcaagtcaatttggagaaaacttatttctttacagtattttgtcttccaatccatattttcctctatttatgcagtctttaatttttctcaggatgtttttttcttttcagtgtaaaggtcttgtatatgtatcttttgtaagattcttaggttttcgatgctatctatttttaaatggcatccttttaggtttctgtttctatttgttttttactggtatatagatttctaaataatgatctttttcacatattaactgcaataacatatcagataattattttggattttctatgcatataattataccatctgtgaataaaaataatttgcatttctgcttttccaattctcatacagtactttttttcttactacactagttagcacggtaagacatgtagaatacaagtaaattgaaatggttatagtgagcacctttgtcttattcccgatatcagttgaaaaaccatcaatattttatcaaaaaggataatgtttgctatagtctctttgtagatactctatcagataaaggaaatttctttccattaatagtttgctaagagtttttgttttgttcttaagagattttttaaaaatcatgaatagttgttgtatttcatcagataatgtttttgcatgtaaaattactatatgattttttcccttttttcttttaatgtgtgaattacagattgattatggaaagatatttcacctttgcattcttggaataatgccaacattgacatatctttttaatgtcttattggatttgatgtgatgttattttgttttctgtttgtttttttgagagagggtctcgtcttgtcacccaggctggagtgcagtggtgctctccaggctcactgcagcctccacctcctgggctcaagcagtcctcccacttcagcctcccaagtagctaggattacaggcacgtaccaccacgctaattttttaaattttttgaagagacgaggtctcactgtcttgcccagactgatcttgaactcctgggctcaagcaattcacccaccttgggctcccatagtgcggggattacaggtgtgagccaccatgccagccttgctttatgtattttaaagctatcttaactaagtgtatataaatttataattctcacgtcttcctgatgcattgaaccttttaccttatgaaatgtccttcttaatctctaatgatgcatcttgccttaatatctatgccagctttctattggttagtgtttacatgatatcttttttcattcctttattttcaacctttctgtgttcttatatgacttttgttgttttttaattaattctgacaatcttcatattttaatcagcctgtttatatttaatataagttactaatgtatttgtgttcatatcttacatcttactctttttgttctgtcttacatgtgtatcttcttttttctctcctttcctgctgtttttggattgatcaagtatttttttctttttcttctcatttagcttctcggtcttgccctgttgcccagactggagtgcagtggtgtgatctcagctcactgcagcctccaccttccagtttcaagtaattctcatgcctcagcctcctgagtagctgggattacaggcatgcgccatcatacccagctagtttttgtgtttttattagagacagttttgccatgttggccaggctggtcactaactcctgacttcaagtgatccgcccgcctcggcctcccaaagtgctgggattacaggagtgagccatcgtgcccagcctgaattctcagtttttgtttgtctgaaagtttccttttgcctttcaatgtgtatagttctctatgttgggagttatactttttgagttctttataaatggctttccattatcttttggattctcttatttttgttgagaagtcagctgttactcttattctgctcttttatatataatatttttattttctctagctgctttttagaatttgtcaaactttaactttatccttagttctggttttccttttatttatcctgctgggatttttagtgcttcttgaatctgtgattgatgactttcatcagatttggaaaattctcagccattatctctttagatactagaactgtttatacttgggaatctagttatacatatactaggtcttttcattgtatcccatatgccttttatgctctttgtgtgtgtgtgtgtgtgtgtgtgtgtgtgtgtgtgtgtgtgtgtgttttaccccttttcctccccgagcttcaggctgtatattttgcactgacctggcatttagttccctgattctctcttctgctttgtcccatctgcatttcaaaacatccagtgaggctgggtccagtggctcatgcctgtaatcccagcactttgggaggccaaggcaggcagatcacttgaggccaggagttcaagaccagcctggccaacatggtgaaaccctgactctaccaaaaatagaaaaattacctgggcatggtggcaggtgcctgtactcccagctacttgggagactgaggcaggagaattgcttgaacccaggaggcagaggttgcagtgagccaagatcgcaccactgcacacgagcctgggagacagagcaagtctctgtctcaaaaaaaaaaaaaatctagtggatgctttatttcaatagtcccttttttattttctaaagtatctgattatttcttattcatcctagttctgtagtataatcctctaccttgtcatctatttttttctaacatattaatcatagtagtaataaattctgtgtctgaaaactacaatatctcagtcatttgtaggtctggtttttaaagattttttttaatttccacataataattgcaaatatttatggggtacatagtgatgggtttggtgttttaagagagggtcttgctctgtcaccgaggccagaaggccagagtgcagtggcgtgatcacagctcactgcaacccgtatcttgcaggctcaagagattttcccaactcggcctcctgagtagctgggactacaggcacatgccaccacacctggctaattttttttatttttattagagatgaggtctcgctgtgttgcccaggctggtctcaaactcctgagcttaaacgatcctctcaccttggcctctcaaattgctgggattatgggcgtgagccacaacaccctgcccatcgtgatgttttgatacatataatgtatggtgatcagagcagagcaattagcatatccatcatctcaaacatttatcatttctttgtattgtgaacattcaatatcctccttctcactatttgaaactatgtaatatattattgttaactgtagttatcctacattgctgtagaacactagaatttattcctcctatctagctctaattttgtatacttttaaaaatctctccctattgcctcctccttcttacccttcccagcctctaatatcctctgttctactttttacttctgtgagatcaactttttttagcttccacgtacgagtgagaatacatagtgtttaactttgtgttcctggcttatttcatgtaacataatgtcttacagttccatccatgttatggtgaatgacaggatttcattcttctttatagataagtagtattcgatcatgtatatataccacactttctttatccatttatctgttgttggacatttgggttgatttcatgtcttggctatagtgaataatgctgtagtaaacatgggggtgcaaatgtctctttaacgtactaatttcctttcctttggagaaatacccaatagtgggattgctggatcatatggtagttctgtttgtttcttttctctgcatcctcaccagcatctgctttttttttctctttttaatgatagccattcttactggagtgagatgatacctcactggttttgatttgcattttcctgatgattagtgataatgagcttttttcccatttttttggccatttatatatcttcttttgagaaatgcctgttcaggtcatttgcccttttttaaaacagagtagagttttttgtttttatttgtttgtttgtttttttactgttgagatgtttaagttccttgtatattctggatattaattccctatctgattagatgagtaagttgtatgtatttttttctattccataggttatcttttcactctgttgattgtttcctttgctatacagaagcttttcagtttgacataatcccatttgtttatttttgcttttgttgcctgtgcttataaaaggttgtactcataaaacattttcccagaccaatgtcttgaagtgtttcccttatgtttccttctagtagttttattgttttgggtcttacatttaatccattttgagttgatttttacagagggtgagagctaggagtctagttccattcttatgcatatgactagatgcatatttagttttcccagcatcatttattgaagaaactgtgctttctccagtgactattcttggtgcttttgtcaaaaatcagttgactgtagatacgtggattaatttctgagttctctattctgttccattggtctttgtgtctgtttttatgccaataacatgctgttttggttactatagctttgtcatatattttgaagtctgatagtatgatacctccagctttgttcttcttgctcaggatgttttttaccatttagggtcttttctgattccacagaaattttagaatattttttctatttctgtgaagaatgtcattcgtattttgataagggttgtattgaattggcggatcactttgggtagtatataggtctgtttttttgtttttgttcggtttggtttctatttccttttggggcttgtttcttggtttgcctgataattttttatcaaatgttaaacattgtccataataaattatagagcttctgttagtgtagagtccaattagatctaggactaagccacctcaaggttgggttatagtttttgtaagacccagtctacctctcatttgcttccacttctataccatggccctcctggaatctcagctgaaatcctggtgtttttatgagatccctactcattaatgggttctgaactccaaattttatctgttttgtgtaccatacaactagcacaatcaccactctgccttatggatgccttatacttggtgtcttggcctcttgtcctgcttcctgacaagtgtggcaaataccttgagtagagtatttcctctcctgagtttcaggcctactttattgttttcccctcctcttcaggatcatgaccctcagttctgtctgtcttgacagtcccaaactcgaatttttgtcttaccacccactagagattgcaaaaagttatgttggcttctctgcctcttagtagtagtccattgcccagattctcagcctcttacccgacacaggaatttgcaaataccctagggagaaaacgactttttgaatgtcagtttagctctttaagatcctcttctctctgagaccttctcttgtcaaattttgactaccttgtcagctctctcatcccttctttatttaaaaaaaaaaattaagcttttctgcctttttatggtctgggaattggtttactacaagctatggcattagagcctaaccaataggtcccttattgaatacatttttttattattaaatagaaaaatacatagcccgagaaagttaagtgggcttatctgtgtattaaggaatactgtttttaggaatgtgacttaggaatactgttcttcataccgcactttgggaactgctggattaggtcactttcccaaggtctcagaattagaaacaaaagcagctagattagaacccagcctcggcctggtgcggtggctcatgcctgtaatcctagcactttgggaggccaaggcgggagggtcacctaaggtcgggaattcaagaccagcctgaccaacctggagaaaccctgtctctactaaaaatacaaaataagccaggtgtggtggtgcatgcctgtaatcccagctactcgggaggctgaggcaggagaatcgttagaacccgggaggcggaggttgcggtgagccgagatcacactattgcactctagcctggacaacaagagtgaaactccgtctcaaaaacaaaaaacaaaaaacaaaaaaagaacccggcttcttgaatcccagactagtccaatctgttccataccatgttaactcattggcttacatctgtggttttcaaccagaaacaactttcccccttcctttcagttatgacaactggctggtatggaagagttgggtcttccactggcattttgtgggtaaaagccagggatgctgctatatatactataatgcacaagacagccaatccacaataaagaattatctggcccaaattattaattgcctcaagattagaaaagccctgtcttacagtatccctcaaaatttatatatttaaaggatcactggctgattcctctttacacttaatcataaggtcaacaccaataggctttagtaggataaagcatctttatcctactaaactacatccagaggccctttgacccaagaaaatgtccatatatgatctagtccgtacttgcttaactgtgtttctcaaagcttttgccaaatatgctccaattctaagacttctctttagttagaatttgttagagctggaaaactttctggtgtagaattgtgcgtgcatatcttgtaaatgcattttgtatgcatgaatggatatctagatgatagtgacatttacctacacatttatagattttatttatatatatacacatatatacataatatatatgtattctaggcatatatatatatatacacacacattagtctaaatggttcttagaaaatttattcattttggtttataactctaatcaatttctataatcaaaagctcttgaaaatgtaatacaaatagatatttaattaaagaggtatattaccaaatgtttttcagaataattattgtttgtaccagtgagtatttctttcagaaattcaattagactctaaaattcatttttcagagcattacaacttggcggcaaaattttcttttggctgaaacactgcatgcaagcttttggctcagaaaaaaatctttggaagtatagctgaaaagtctgattcagataactgaatggctaaaattttccttgtttaaaaggaataaactggttacacgtgaaatattaaaaactgtatttaaatggatagttaactattgccttatttcttttaagtcttaaccaagctggcttatcctatttcaactgctctagaactcacatcatttttgattcattgattttttttttttttttagtatcccaatagaagccatcatttctaaggttccaccccaactttgctgagccttggcccagaaaatttgtttagcttttctctgctgttgttaagctattttaaattttaaatttttgtgtttttaaacctttctgtgtttttaaagcctttctggtttaataaacaattctaaaatctcaagaaaatatccaaattcttttgttaataatttggcacttagccatctattcaatttatttatcatggtaaattttgcttatacttaattatttcctctagtcctagaactccaccccttaccataataaaggggcagtttataaaacaggtgtttttgtaagtaatttacatggtttagtatgcaaaaagtacaataatagagctgtttagctgtcagtacttgtgaggaagtaagcagttttttcgttattaggatgaccatataacttattagaaaaactcagatgcttttgagagtgaaagagtggggtgctattaataatactaggacagttctgggcaaaccagcccatatggtcacactaatcattatagatatttaaacaaaaatatttggtaaaatgaatttgtgtattggttgaggtttttggctgtgtttatttctaacatttcttccagtgaaaagattcttgatcatgtgctaagtatatgccaggtaatatagaacttaaaaaaaacatgagaacctctaatctcaagcaggacaagttggagaggcaagatacttatagataatgcagtaatgtaacagcacaaataaattcaattcattatggttttattgagtgcctactgtatgtcaagaattgtggttataaagatgaacaaaacaaaaactccttttcttgaaatctagaagagacatacttaaataatatgatgtgaaaaatgatattattttcatgaactaatttttatagaacaaatggaacaagaagttggggaaagcttttcaaagcaagtgatgtatgaactaggccttgaggaatccttacaattttggcaagttgagattacaaaggtattcaaagttaatgaggtaataaaagcaaaaggcagagtccttcatatgatttgttacaagaaatggcagaagggagatatggggcaaccatctctgaaatggtaattgtgatgggatttaaatgctatgctgggcaatacattattaagtgcttaaagtatatatatatatagagaagacatcctttggactgagaaacattttgtgatcagtttaccgtaattccataaaagaaaggaatcacacttccatttgtttataaagccctgtttcagagggatcaacaaatactaaagatgaaaatcctttttttaattaaatgctaaagaataaaagctgcaataatccctctaaaaagtattagtgatgaacaatcccatggggttatagtgagacaaatgtgatagggttagaaaaattgtagagaaaaattatggtaaaagcactagggaaatgccttagaaaattaataaagattggcttggtttaaagacggtaaataaagactaatgcaaaaggctaatgaattcagtcatggagaaagtttatactatagtgtttgctaaaagaattaccactagatgggattttattaagcatttttttattcaaagaaaaagggtaactcattaataaaatgtgtagttgatactaaataaataaatcaactagtgtagttgatactaaattaggagatagtgtagttgatactaaataaataaatcaactagtgtagttgataataaattaggaagatactgtagctgatactaaattctagaaattctggtaatagactctagaaatagatgtttgaaataggtgtttaaaataatattttaaagaaaatcatattcaccccattttaaatccacatagaagcagcagttaacattaaaaacttgtgtccacttccaggagatagtcatggtttaagggtccagaaatcaatggtagaatcacctgaaatttagaacagtagaaatatgtcttcactaaagagtctaaattttttttttttttttttggaggagtcttgctctgtccccaggctggagtgcaatggcacgatctcagcccactgcaacctccacctcctgagttcaagcgattctcctgcctcagcctcttccaagtagctggaactacaggtgtgtgtcaccatgcctggctaattttttgtatttttagtagagatggggttttaccatgtttactaagctggtcttcaactcttgacctcaagtgatccacctgcctcagcctcccaaagtgctgggattacaggcatgagccactgcgcctggcccaagagtctaaatttataggatgtatatgattaaaagtgacttttgtgaacatttaaataaatatttgtgactgaattttctatggaacatttttccttcagtggcttgcattttaatgaaggaattattttaaaattaccttattccctcccaatgttgtttaaatatctagagggtatctagggcttaaggaagattggatgtggaacaatgagtggaggcctagagaacaagggtagtttcctgcaacagttatatggatccctagcaaggttcatatttctgtctatactgctggttaatctgaatattcccataaattgtggaacataatccatggccttggttttctgtttcttgtagtaagatttatcattttatttctaccataaattagagatcattacatgattactatgaaggatctacattgctatttgttatgatcaaataaacagtatttttgcagttgactattcagggatctgttaaagcatttagaccttaggccctcatagcatatatatataagctttttggagacttggctctcactactttgagaatttggcacacagggtaatcaaaaaaaaaagctttcttggctcttgcctgtaatcccagcattttgggaggctaaggcagaaggatcccttgagctcaggagttcaagaccagcctgagaaacatagcgagacctcatctctactaaaaaataaatagtaaaaaattatcccagcacagtgatgcgcacctgtagtcccagctaatcaggaggctgaggtgggaggatcacttgatccagggagtttgaggctgcagtgagctatgattgtgcacactccagcctgggtgacagagtgagaccctgtctaaagaaaaaaagctttctttcgaaatggcctcaggtttatcgatttttaatttaacattgctctacagatttattttgttgagtttttttttttttaagtactaagagtgttttgggcaggggaaagaaattcacagtgtttttttgttgttgtattttgttttgttttctgagacggagtctcgctctgtcacccaggctggagtgtgcagtggcacgatctcggctcactgcaacctccgccccctgggttaaagcaatcctcccacctcaacctccccagaagctaggattacaggtatacatcacctcacctggctaattttttttggtattgttagcagagatggggtttcaccgtgttggccaggctgatcccaaactcctgacctcaagtgatccacctgccttggcctaccaaagtgctcggattataggtgtgagccaccacacctggcctaccacaatgttttttaactgaacagttggctgcagtaagcttttagaagcctacacgttggtatttgagcatacgaggtggatcataatggggatcattaggtttctttgacaggtgatattaagaacccaacccagcatgccacttgtaaaccatctatacatagagacatttgtcaccattgacagttgtgacatttaatctgggatctatttgcaactcagcttcctatgtattactatgtatttaacagtctcaattcaggctcaaagcatcagcttttttcttctagtttttctaggttttacttaacaaaggaaaatagaaatatctgtttactattgaggtgatcatttctcctcagatgagtcatgccagtcacgattcttggatgttgacctcttgtgctgtttttgtagttcacaagccaaagctgcactaaataggattatggaaattagattaatggtccaggaatgaggcatagtgctttggttgaataggaaagtctgtaaagtggagccagtagtacctgaaaaaaacttaatccaggtgaggcagatgttctgaagaatctcactcgtctcacctggattaagtttttttcaggtcctgctggctccactttactgactgctattcaaccaaaccactatgcatcctttttggagcactaatctaactccaaaggggtacaacaacctcatcacttctaatatgaatacaaccaagatattgtgtgagctgagagtggcagaagaaaactggaaaaagctctctcttagatagccagtgtcacttggagaagtctattcttatgtaaaaggagttatattggtcttctaagaagaaaggttgtcaggaactggcaagcactaaaatgcctaaccaacaccttggagttagagcagtctagttttagaaggcagagactaggagggataatcagtcatagctaaagatagggaatctagaccaaagctcattccagttcctaggattagtgcagaatacaatttattaagctagaacagaagctttgcagtcacaattagatcatcacaacgtacatctggatgtcagaaataattctgcaccctactcttttttttttaagttaaagagactgtctcccaggctggagtagagtggagtgatcttagctcacttcatcctggaacacttgggctcaaacaatcctcctgcctcagcctcccatatagctgggactacaggcacacgccaccatgctggctaatttttttctattcttttagagacagggtcttgctgtgttgtccaggctgatttcaaattcctggcctcaagtgattctcctgctttggcctcctgagtcactgggattgcagggcaccctattcttgatttttattcttcccttgtcaggactagcttagaactgttaccccaactgtataagtaagtgcatccttaactatcaagacccaagaaagatatgagcagagcaaaatgaggagctcacgcaagcaaaattaagacttgaaatgtcagcagataaggtatctgaacatgtctatgacaggaagccagttgcaacttaactactgcagtgctaaattaaaccactgctatgtataccatatttgaagtaataattggatacaaaggtatatggcccttacttcaaagagcttatacttgtgaagtgtacactagaagacagtatgtagaaattttaccaaatttttatcaatttacagtatgaattttaccaaaaaattcactatagaaataatgcatgacttcacatcacactggtgatcagagaaacaatgtattttaaaagtgacatatgaactggtttgtgaaatacaaatgaaattttgatgcaaaatataactagaaatgaccttagatatcagctggtacatcttagaaattcgagaaaaattaagacccactactagtgggataaatgttggtgtacagtttttcttggtgacagcttgagaatacatatcaaaagccttaaaatatgcatatcctttgactcagtaactttacttacaaattaatcctatggaataatttaacatatgcacagatttacatgcaagaatgttcttcatagcattggtcttaaattttttaatttttttaacttctcattttgcagcaaaaaaaaagttgtaaaaatagtagatattttccatatatccttcatccagctttcccaaacattagcattttatataaccagagtacatatatcaaaaccaaggagttaataaataggtagaatttttgtcaaataaataaataaaattttaaaaccagcaaactactatagatgtgatactattattgaagctacagacctttttcagatgttcccaattatcccacttttttttttttttggtccaggatacaatctaggattctactctgtgcttaataggtaatcatattcttttattctgttactatctggcataattcttcagtctttttttctcctccttaacattaacacttttgaagagtactggccagttattttatagaatgtctctcaatttttgtttgactgatgtttccctgtgataaaattcagattatgcatttttggcaagaataccacagaaataatattatgctcttctcagtgaatcatattcaaagacgtgatactaattagcctcgatagtagtgatgttgactctgattcactttacttggttaaagtggtgcctgccagttctctccattgtaaagttagtattttttctttcttattgaataaatatctcatggggaggtacttcaagatacgtcttccatacatacatggattaatcttgcctgaaataattattactgtggtattagccaaagaattatattttatttttattattccttataaacttctcaattcaaaattatacacttattaatagagaagagctttcccctttttttgtttattaatttacttatgtcatatggactcatgaatattttattctattatttaaaatatattactatcactatttattgtgtttctcaaattgtcgtagatttgaccattggaagtgccctcaagttggttcttatgaacttccaatgtactacagttattttctgacttccttacattctgcgaccacaagatctccaggttcagcttgtgttttccttgccccagccatgaaataggaatttctccaagaagccctggtttcttttattgtacactaagaatttatacacacatctatatctgtgtctatatttaacctgtgtgcgtgtgtgtgtgtgtgtatgtgtgtgatatatatatgatttatttatttttttttttttgagaaggagtttcactcttgttgcccaggctggagtgcaatggcgcaacctcagctcactgcaacctctgcctgctgggtccaagcaattctcctgcctcagcctcccatgcccagctaattttttgttttgtttttttttttttagtagagatggggtttctccatgttggtcaggaatggtctcaaactcctgacctcaggtgatccacccgcctcagcctcctaaagtgctgggattacagacgtgagccactgtgcctggccctgtgtatatatttttaaaacatgagtacacagtagtatcacctattgcaatccaataccacagagttcaggactggcttagagctgttaccccagctctgtaagtgcagcctgaaccatcaagaccagggaaacatataagcagagcaaaatgaggagctcacacaaccacacatcctggttaattttaattaagttttttaaatatatagaaaattaccatggttctaaaagtcaagaactattcacaaagatagagtaaaagaagtgtcacttccctgacattactttttcgccattcttgttttagcgttcttcccaccctgttcccacctacctcttgtaggtaaccaatctcagttttttacttatcttttctgtatttcttctttttttttctaacagcttcactcagatataattcacacaccatacaatttccttatttaaagtatacaattctttttttttgtatattcataggttgtgcaaccgtgaccacgatcaattttagaacattttcatcatcccagaaactgtctctctccagcttcacccatcttctcccaaccttaagcaacgattaatctactttctgcctctatgcatttgccttttctggaaattgcatataaatggactcttacaatatgtggttttctgtgttaggcttctttcacttaacataatgttttcaaggttcatccacattatagcatgtgtcagttttttacttctttttattgccatgtaacattctattgcatggtttattcatttcctagggctgccataacaaattaccacaaagtgagtggcttaaaagaacaaaaatttattatttcacagttctgaaggctagaagtccaaaataaaaggtatcagcagggccttgtaccctctgaaaactctaggaaattgttccttgtctcttcctagctactgggctcctggaaatcaattcttggcattccttggcttgtagctatatcacttcagtatttgcctctgtcttcgcatggccttcttccctgtgtatatctttctgtgcccactccttttattttaaagacaccaataattggatataaggcctaatctaatctagtgtgacctcatcttaactaattaatctgcaaagactttatttccaaacaaggtcacattctaaggttccagatggacatgaattcaggggcaacactatttagctttctacatatagagatacaacattttatttacctattcttcagttaatggaatttcattcctgtatttatttatgcccagatgagcagatacatgagcattttcttatttctccttcctttttatttgaaaagtggcatactgttgatatgtttgttttttccttttttcagtttataatatattctggaagttttttcatatcacttcacagagctctagctcattctaatctaaatattcagccatagagaatttattaatatatacataagatggaaattgatttagtattttaatttttatgaacatggaatgatgtatacaatatattggggatgttttcttctataggttttttaatctgtgttttcaaggtattatattcacacagtatgaaattcctccttctagatgttacccatctaatcagccctttcccagagtgaaccaatgcttccactgaatgtcagctatacacattgttccacaccttgcctttttgcttaatatatcttagagattgttccatttttttatagctgtataatatttcattttcttgtcacatcatactttattttactaatcctcttttggtacacatcttggtatttctagtcttttgctacaacaaatataacagcactatttgcaatgaccaaaataattggaaacaaccccaaaggtccataaagagtaaactgaatatattatatatttatgtgatagcatacataatgaagagagaatgaatggattaccactcaactcaacaatatcaatgaatataacaaacataatgtggaacaaagtcagacccaaaagagtgtatacagaattccaaactaaatagggtaggaatagctcatgtcagaacagcccttcttcaggtagcaattataactcttaacaaaatattacaaaaccaactacctggagacactggagaagaatgaaaatcaggcagaaactgaaggagagtctatacttggaggaggagaatggccttgagtacatttcctatttttatgactctttctctagggccagcccaagttggcaccaagtagcatgcctaaaagttggtagaaaacacgcagtcttactggcttgaagatccagaggaagagtttaggtaaaaagtgagtgaggaaatttcagaaaggagaaaaaccatacagaggtagccctaaattctacatacagaccttatccaaatctctggatgacccctcaattacgcatatgcagagtggattcctagcagcccagctaaggctaaaagaacttaataaagatgtctcattgtccattgctggggtgcagagtttggaatttcattctagccaagtttacttgtctccttaaaaaaacaataataatcccctccttagaaacatttgagtagactgtacaacagaggtcagcatttttatttattttttttttttgagacgagtctcgccctgccttccaggctggagtgcagtggagtgcagtggcgcgatctcggctcactacaagctccgcctccccagttcacgccattctcccgcctcagcctcccaagtagctgggactacaggctcccgccaccatgcccagctaattttgtttttctatttttagtggagacggggtttcaccgtgttagccaggatggtctcgatctcctgacctcgggatccgcccggcctcccaaagtgctgggattacaggcgtgagccaccatgcccggctggcatttttttcttaaaggaccagagagtaaatattttaggttcacagggtactctttcagtaatttaaatatgacaaggagcaaacttgaatataggtatgtagaaattatcaagtgtggaaaatgaagagaaaaaaaacaatgaacatggccgggtgcagtggctcacacctgtaatcccagcacttttggaagccagggtgggtggatttcctgaagtcaggagttcgagaccagtctggccaacatggtgaaaccccgtctctactaaaaatacaaaaattagctgggtgcagtggcacacgcctatagtcccagctacttggtagggtgaggcaggagaatcactagaacctgggaggtagaggttgcaatgagccgagataatgccactgcactccagcccaagtggacagagcaagactccatctcagaaaaaaaacccacaaaaacagagaacagagcttccttgacctttaggacaacagcaaaaggcctaaaatgttcataattggagtctcaaaaggaaaggagctagagaatgaggcaagataaatatttgatgaataatggctgtaaggtttcccacttctggtgaaagacatgaacttacagatttgggaagccctgtgaaccacaggcagaataaatacaaagaaaaccacacctaaacatttaattagactactactgaaaccaaaagatgaagagaagatattgaagagcaaagtagcacattgcatagaatgggaaattatatgaacaactacagattccttacagtggagatcaaaagaaagtggaacatctttgaagtgctgaaacaaaactgtcaacccagaattctatctccagcaatattttccttcagtgatgaaggtgatattaaaacattgttatataaacataagagtatatactatgtgattccatttgtataaagtcaatggaaacaggcctcaagttacttttgatggggattagtaattgcaaggaggggagggaatttttcaccataatgaaccactccataaattagtaacataaaaaacagcagttttattttctcatgattctccagtcaaggctaggctcagccgagtagttctacttgtcttgacagtggtcacttgttggctacattaaggtagtacgttggctgcaggctagactcattagggatgttcagaactctctatttagtctaaaggccaacatttccagagtcagacttccaatttgtactcttctctgtatgtgtcatacctcaattaaaagcccactttcagactaggtgcagtggctcacacctgtaatcccaatactttgggtggccaaggtagaagaattgtatgaggccagggattggagaccaacctgggcaacacagcaagaccccatctctaccaaaaaaaaaaaaaaaaattagctgggcgcagtggcacatgcctgtagtcctagctactcagaaggctgaggcaaggaggttcgtggagcccaggagttcaaggcagcaacagtcagccgtgatcacaccattacactccagccttggcaacagagtgagaccctatctcaaaaaaaaaaagtctactttcaaagggcaatagataattatttttttaattacaatctaacaaaaatagaataatctaatataaatagaaactacaaaatgttccagaaaatgtaagtattcctgtgtgactagtgtagaattaatataagaaacattaataggtgataaagtaaaaaagataacttagggttagattacactgagatttgagtgcttggctacagagctgggtcttatttgaagggaagtgggaaactattgaagggttttgagcagaggaatgatatgttcaaaacagtggtttaggaatataatcccatgctagtgtacaaattagactagaggagggagagactattatcaaacggatcaatttggaaacaatttagataagcaccaataggaattgaattaaaataatagcaagctaatgaaaaaaagggaataaaatgtattaattctacatctacacagattgagagcctactatgttctatgtacttggtaaaggactgtatatatttttgtctttatagtcaaggaattcacaacatatgaaatgtagaagtatgaaaaaataacaatttgttgtaataagaactataatagatgaatatttaaggtgttaaggacacaagaagaggaagcagccaataatacagaggagtctaagacatgctttagataagatttaaccttacatgagtagttacagtttaccaaacaaagaaggcaaagaacaacattctagccagaagaaacagcacataaaaagtcacaggcaaagaagagtagagcatggtgaattgggggacatagttcactatatctacatgtgcaagctaagcataggtacagaagctagaaagataaggatcacatcactaagggcaaaagacatgaaaaatttggtgactatatgagatgaaacaagatttagtgactttataagaagacaaggatgaccttaatattttgaatttaagtgactagaaggataatgataaacccaatagtaagaattgtataacttatagacacttttcatctgagtggacattaaatacctaggagttctttttatatgtgtgtgaagaatagcactagatgtgtttcatcaatgaaattctgaatataaaataatcatcataggttcttaaagccagtcaacaaccaagaattgatactgaccactggcacagtttttttcaaaaatgacaaactttaaaagaaaaaaaaatgccttgaatgaatgtttttcttaactcagaagaaaagaaaaatctttaactacatatagcttacctgaagaaaaaacagaattgcagaattgctgtgaatgttctaaagacctggttctatataatcaagttaattcctctttcatgtgttttaaaatattgttgatccaagaaccaaccatcagctatgctggaagtctataattatgcattgatatatgagaaggctatcattctctacagacgactggtaccatccttagcagaatacttgaggctgcttttggtttagggaatctgtagctcagagattttcctagaaagtaacctctgttgttcaaattagatagccatttgtggagacaaaacccactgggtataggtagtattacctgaatcactaaaagataattgattagaaatccaaatcaaaccttgagactgctgagtctagatgagtggctgcctagggatagagggcaggaaggggtgggaccttacaaagacacatgaagaaacttttagaattgatatgtttgttgttttgattgtggtgatggcttcatgagtaatacctattcaaacttttccagttgtacacttaaatagtgcagtttattgtatgtcaatcatgcttcgataaagatgttagcaaaggaaatgactttcatcttagaatggtcagataaactgttttaagtgctacaccattatccatataaagaagagatggccatttaaaaatatttatacaagacttgaagcaatgtaggtaacctgaggtataataaattgagtgtcttgatatttagagtcctgatgtaatacactttattaagatatagatttgtaaatttatgctaattctggatgattatttttcttgagttggtttctatggactgaatgttaaagtgggttttaagcaggttttatataatatatcaataccacattagcttgattttttttattgcgagagatgcagaaagatcaatatcttacatgctctatatcaccataaatactttcaataaagcttttttggcctggtagggtgactcacacctgtaacctcaacactttgagaggctaaggctggagaatcacttgaggccaggagttcaagaccagcctgggaacatagtgagaccctgcaaaaaaaatatggaaattagccaggcatggtggcacacgcctgtagtcttggctacccaggaggctgaggcaggtgatcacatgagctgaggagctcgaggttacagtgagctatgatcataccacttgcaatgtagcctgggcaatagagtgaaaccatgtctcattcaatcaaacttatttgaaccttcgtacatttttgcttttattaatgagcttttcttttaaaatcagacttttaatggctttctggcagtgtcatcctggttgtggttgagactaatatgagctctagtttgtgttttttgttattgtttttgtttgtttttttgagacagggtctctctctgttgccaaggctggagtacagtggcacaattacagctcactgcaaccccttcttcctcccagactcaagtgatcctcccacctcagccttccgagtagctgggactataggtgcacaccaccacacctggccaatttttaaatttttttgtagagacagggtttcatcatattgcccaggctggtcttgaactactggactcaggtgatccacccacctcaacttcccaaagtgctgggattataagcatgaaccaccatgctcagctgagctctaattactgaagattaattctataggttgaacctggatatgttagaagacataggggactttcataaagaagttcaaattagaatatgtgagataggagaattttttaaaagaattgttatttgatacttagggtgtagtcatatactcttaatattgctagagtgtaaattggtaaaagttttcatatccttttatacagcaatttcagctcttggaatttaaataatcaaaagtctgggagcatctacatgtgaagacattcatgtcacttttatgtataatagtgtagcaacttgaaactatatatattatgttacatgaaaaataaactaacacagtgggttcattcactttgtgaaacttcatcacttatttgaggactttgagtataaacaaatcagaatataaaattacctgctattacgaagtagcaagagaggctgggcacagtggttcacacctgtaatcccaacactttgggaggccgaggggggcagatcacttgaggtcaggagttccagaccagcctggccaacacaataaaacccatctccactaaaattacaaaaattagccgggcgtggtggcatgtacctgtaatcccagctacatggcagactgaggcaggagaatcgcttgatcccaggaggcagaggttgcggtgagccgagatctcgctactgcactccagcctgggtgacagagcgagcaagagcaggcgagcaagcgagactccatctcaaaacaaaaaacaaaacaaaaacaaagtagcaagagtgagtatgccagtgtgctgggggtaagatgatttagatactctgtattttccatgtcttattttcatactttaaaaaacatatcagttgtttctaaaagaacatattccttttagttacaaacatatacattcagcaaccctaaagtagcatagactactactggctgaagctctggggttttattagtacagtgatgacttaattaacaaatcctctttgaacaaagcctcttcactcaagactggccttggtgcagtaggcatgagagaaggaccagttttctctgagctagatcggtagcagcagggactaatgaggcagggccttgaaagtggctctctctcagatctaactcctcagggactggctaaagctgaagctgagggtactggtgcactcctgggacctacacagcctggttacccaggtgttgaaaaaacagtttctgtgccaacaccatatgtggcttttaagagactcggcaggactcttgctttaggcagagcattccttgtgtggaatgagtaagctggaaaataacaaagagggaatcccatgtgctaggaagcttcctcttgtcttctgtgtgctccgtgtactgctttttcaattctctgggccttattttgttcaactataaagtaaaaggagtagctaaaaaatctctaatatatctttcagttctaatagactacatgtttaaatcaggaatcggcaaactttttataaagggtcaaatagtaattattttctgctttgcagggcatactacctccattgcaagtgctcaactctccctctgtagcgtgaaaacagctgtatataaacaaatgggtgtggctgtattccaataaaactctatttataaaaataggcagctagccagatttggcccacaggccatattttaacaagcccaggtctagatgttaatgtaatgggaatgtcatattaagagaattatttgatgaataggatataattcttatttcatagagaccattctctcagactttttatttttaaagcgtaggcaaatataaaatattatttcactgtcaggatgtaataccatgggaaaaagattaaaaatactctggcaccaaactgttgtagtaaattatctgaaatagagcctttgacttcccaattaaggaagaaaatggtgtctgcaacacctgtgactgggttattttaagtcttcaaaagttaggggcctagtagaagagagtctcaagggcttgttcattttctttctcatcaaatgggccaaatcatgcttttcatagtagaaggtaggctgtggaccctttactattttatttttaaatatttctcttggctaggcataatggcccatgcctaaaatcccaggctgaggcagaaggatcccttgagcccaggagtttgagaccaccctgggcaacatagcaagaccccgtctctactaaaaaaaataactttttaaaaattaaaaataaataaataattttttggtggtccagaaaggggcagctgccatgctttgcaggtttcagatccccatctatcttgggttgggtttctatcttggtcttaagttatcagtattctaatatggagataagtctgccttcactttggagacctttgttagttcttccatgtcaggcttcagctagtatagtttgtctaatgcatttatataaaacttgtttccaacaatgaaaaagcaattacaggttgggatatgtaattcaggcccattactacataaaaggatcagcacagtggtactttatctgactagggaagtctaaaatattcttgttggccagcttgctttcacataagcactgttcgggatcttttctaagttgcagaacatgaattccttattggcctatcccactagccacagctgtgagcacaacagaactgacacatacctggtaattataccttatctaaagtgaacagggccaccttcccagcatagtgacagctatagcccttaatctaatgcagtggttctcaaagtatagactcactgggggtgccctttctgaggctctttcaaggaatctcttctatgaaatcaaaactacttcacagtaattcaaatatattatttgcctttttgactctcaatgacagtagagttttccagagactacataatgtatgatatcacaacagattgaatactgaagcaaatgttaagaatccagctgacttctgttaaccagatattaaagagattagcaaaaacttaaatgtcatactctctactaatatttttgtttggaatatatagttattcttatgaaaatatgttaaaatgtaggtttattcagaaattttctgagatcattttattttctaatacagtaaatattaataaatatgactcacacaaaatctatttggagtcctcaatttttttttcttttttttcctggcttacattttttgatgcactcaatttttttttttttttttttaatttaaaaagagacagggtctcactatgttgcccaggctggtttcaaacttctgggctcaagcaatcctcctgccttggcttcccaaagtactggtattacaggtatgagccagtgcacctgacctcaataattttttaagagaaaaagtttgagaacccctcctctaatgtaatacccttagttgcaatactctgatctcatggttactgatatcatctttaccatattccctcttataaaatatttactaaaattatccccagagataacccttgttaacaatttagtgattacttctagacatctttctactgagtgcttgcattcacacataatatatatacttttacatttattggatcatactgtggtctttcaaaacttattctcctgagtttaatttttctacctgatcactctctgaattcttataaaatcttaagttcttttttttttttttttttttttttaagacagggtctcactcagtcactatcacccaggctggagtgcagtagcatgatcatagctcactgtagcctcaaactcctgggttcaaaggatcctcttacctcagcctcctaagtagctaggactacaggtgtgtgccaccatatctggctaactttttttatttttagtggagacaggcatctcactatgttgctcaggctggtctcaaattcctggcctcaagcaatccacccacctcagcctcctaaagtgctgggattacaggcatgactcaccatgcttagcctaaatcctaaggtcttaaaattgaaagggacagaggggtcatcttatctcattcccaactcaagtcagaaaccctctctaaaacattcacaacctgagaggtccatttaatttggttttataaaccctaaattgttagaaactttttccttctcttggacataaatttgccttcttgatcacttttacccataggttctagttctactttgggaaactatatagaatgcatcttatctgtcttcactgggcttcattgtgggtattttcttctgttctatcttccagttcactaattcttttttaagttgtgtctaagcttctattaaaactatccactaaatttttactttcaatttccatttaaacctgttgtattctagtcctctgttaaaattctcgattttatctttaactcttgctatttcaaagtttctgtttgttaagttcaatatctggaactgctttattaagctgtaatttctgctggttttaatttcctgcttgcctctttgtattactgtttattttttattgtgggtgatatgttgtatttgcaaaattgcttatagaaataatttgaagtataggatgattcatgtttgcttttggcaggcatggggacattggcacactatatttatcttcatctaagtttaaagatttagatgattagaggctaagctacaatcccttgtctaggtctttctactgcctgttcacacacccttaatccttttgattcccaccctgagataaggagattttaactaggcccattactcttgacagactgggttccagactttgtcctcctagcatcaaacaccagactcacttctctgggtttctatcatcctctgtattatagcctggtaattcttcattcttttgttaggacttcaatgccttcaaacagattttttaaaaatatgtccagatgttctaattcttgataagacagttggtctgaattacctaggctgccattagtacctgcaacctactttaatccgtattaatatttttctgtccttctggattgcttgggaaactgttaaagagcaggaataaccctgaccaggcatctgtaccacattcaaccagatgctctgtaagagctcctcttgaaggtttaatctgatattaatcagataggaagtacagttcttatgaacagattcagtcttcccacagggatgagttcagttaagaggggcaatggatacggtgtacagtggccccattttcctttatgtttatattctagtcttgtaataaaactaatgctcagaatgaaaggtctcaatttaggatttaaaccaagtataaacaaaaagttaaaacaagctattgttcaaactttgacttaagtgaaagaattggtttttttatttgtttgtttatttttgaggcagggtcttgctctgccacccaggctggagttcagggatgcaatcatagatcactgtaacctcgaactcctgggctggagcagtgctcccgcctcaggctcctgagtagctaggagaacaagtgacaccacacccagctaattttttaatttttttgtagagatggggctttgtatgttgcccaagctggtcttaccttctggcctcaagtgatcctcttgccttggcctcccaaaagtgctggaattgcagacatgagccaccatacccggcctggttttattttaaaaaacacttttgctgcccttctgtaaaatgttaattatatgtatgcacattttcttttatctggtgcttctctaaattcctttagcccacgtcttatccaactagtcatgtgggaatttcctctttggggaattaaatatttaatattaacttctaggtagtacagagcagcccactgtgtttcacttttgtattattcctttgttagcactaagttttctgtatcagcttgtctagaatttttgtttcaaaattgtattcttctaatttatttgcagtttttctcttctaattgtttaattgtccatcccctaccccctgccccaaggcaaatgtactgtcttttatccatatgtgcccataaattctaaactcaaagatttctggttctcccttatatttatggtatttttctacttctctgttcagtatatttttgcaagtgtttcagttttcttcagtgtttgaggttctctagtgtgtcatttcattttcatgcatcagagtaattcctaccattcttatatggagtctcttacctgatgattttttaattagtaaagtgcaatattgaacaacattgaagattttatttcttaatctaaaacataatatttatttaataatgaaatggaaatataggttttgtgaaagggagaaaggtgtttctctaaatattatacctgtgtcaaaaagctgcaagtgctactaccactgttttgtgacccctgaatgatttctgctttctttatattaatacttactctaatagtaattgaactcccaaaaagatcacaaagtccccaattgctagctttataaatacattgatgtgtaccttgtttgatgagataaaagcttcagtaagtgatatccccacctgtgtggttaatttcaaaatattgtttgtctaatacattgttgtcagtgacaactgaacaagaacttttagaagcagttggctgtccattaatggcagatttcaaggctatgcaaattgtgccagttcagccctgcattttttcgatattatcatatcaattgagtcagttcagagtagacaaagcaaggttatgggaaccacctagagcatcatgcaccatttaacatcaatgcagcatacatgaacatctgcaacttcgatcttattaacagaggatagaatggaaggcagtaaacagctttcttcatcacttaattgcaaaatagtatttcctaatgtttgcattgtttatcaacacgaacttcatcaataattgtataattatggttgcctagatcacagtgccctcatgcatcttgtcacttattatagagtggtctgagtttaatttgaatttgaacacatgatacaaggataataatacaagttccttgaaatgtgagttgcataatacaaaaattttgtgtagtaggagaatggcaagttatgattcttcagtcactttggggattaacacaaggaaaaacaggactgaaaggcagtgaaagatgaggggaagccactagttagattcaaacatagacccattggacatgagagtaggttatgttccttagaattaatcatgagtaattcgatgtttgctttaggcccaaattgagctgaattaaaacaggattattatgcttaggtcttcccttcagtctctgtagttaaagagagaaaatggcagaaaactacaaatatagtgaggaaaaagctatggtggccaaagttaaaaataccacatgctgaggaaagccttgacatagctgctcagccttcattgctgttgcttttgaagcctgataatgccacactactcctaattagcaaatgttagtattacagtaagcaatcaagtgcagtcttcaggctttgtggcagcagtttcgcagtgcaaaatattgaagaaaaaatgaaggaaaacaatataagctcagccacagttattggtgtggtcagtgggagttgtctcacaagagagcaggaaaaggaaaatgtgaaaaacagtgggtgcatttaaagcatgtaagacaagagctggctagtctgaaaagtttgtctattttaatcatgaaaatctcacatttttacttaaatccattttatatttaaggaaaaatctaaggcttgttcatgaaattacacttgaaatattttaatttgtggttagagtctcctccccatctcaaattaaaaggtattaaattgtatattgagtgagctccgtttgtactcagctcttcccaattaataaacatagtcatttccttaaaaaaaaaaaactctagagttagaatgttttctctcactaattagtctgtatttatgcctttaataattatctgttcattttctagcagcaaatgtttgttctcagattaaattggagaaggaaggaaaaaaaagatagctacccacagtatagtatccacagacgatatagagttatgtccctctttgtgtggttcttgagtataatagacataacagaagctttcttaatatgatagttaatctattattttctgtatttgggggatgctaagaactggtttactagaggtaatagtttgatctgtagttatttatgttaaaatacttttttaaaaggtaattacagcttctactataaacttgaaaaagttggtctaactctgtgccgaatgagcggggagatattactatatacatacatataagtgtatatgcctcttacctgaatacctcagggagcacacttttctgaaccagggttttgtaataaatgtgtgtactactaattctgacacatgtatagttctcctttaaataacttgtatgcaaacgttattcagaaacgtcttctaggagctatttatcaaaactgctataataataactttgtcctaatgagtttcagtctctgtttagggagtaatcgataaactacaaattaatgttccataattcacattataatgcacatataattattttgagatgaggcaaaccctatgcatttaatttacagctataattaagtaagctcatttgatactaattaagtaagtctaaaaggatcataggtttgtgtatttaattatcaaggtacaatcagcaactaattccttgaaaagctttcctatcttcagttcaacactgatctcagcccacactacaatttatcttcttgcatcttcaatagattaaaatgcattgtgaattgtggagaatctacttggtaagttagcttctttatttaaaaagtatatatatgtatatatatatacacatacataggcttaagaatacagaaattctataatctggcaaaactgtccttaagaagtgaaggagaaattaagacatttccagataaaagataaagaggtttattgccaatagacctgtcctacaagaaatgctaaaagggaatgcttcaggattaaatgaaagaatgctagacagtaactgaaagccatatgaagaaataaagaactcctgtaaaggtatctatataagtaaatataaaaaccagtattgctggtttgtaactcttctttcattcatgaaaggaaaatgcctaggccgggcgccgtggctcacacctgtaatcccagcactttgggaggccaaggcaggcagatcatgaggtcaggagatcaagaccatcctggccaaaatggtgaaaccccatctctactaaaaatacaaaaattcgctgggcgtggtggcacacgcctgtagtccctgctactcgggaggctgaggcaggagaatcgcttgaacctgggaggcggaggttgcagtgagccgagatcacaccaccgcacttcagcctggtgacaaagcgagactccatctcaaaaaaaaagaagaaaagtgcctaaaacaataattatatgttaatggaaagacatgtaaaatatgtaatttataacaacaacataaagagggaaacagagctgtataagagcaaggttttttatactgtccaggctaagttggtaacaattcaaactagattgttatgaatttaggattttaattgtaattgccatagtaaccactaagaaaataagaaataggtcagggcgcagtggctcacacctataatcccagtgctttgggaggccaaggcaggcggattacgacgtcaggagatcaagaccatcctggccaacatggtgaaaccctgtctctactaaaaatacaaaaattagctgggcgtggtggcacgcagcctgtagtcccagctacttgggaggctgaggcaggagaatcacttgaaccccggaggtaggggcaggagaatcacttgaacctgggaggcggagtttgcagtgagtcaagatcgcactactgcactccagcctggatgacagaccgagactccatctcaaaaaacaaaaaaagaaataaaataagaaataatgaagttttctctagttttgttaaagtagtatataaaaattagattattagaaaatacacttaattgctagcttagaagtcttttaaattctactgtcagccgggcacagtgtctcacccctgtatttccaacactttaggaggccaaggtgggaggatcacttgggcccaggagttcaagaccagcctctgtaacatagggagaccctgtctacaaaaaattaaaacaattagccaggtatgatggcaagcacctgtcatcctaggtactcaggaggctgaggtgggaggaccacttgagactgaaagattgaggctgcagtgagtcttgattgcaccactgtactccaacctgggcgacagagtgagactctatatcaaaaaaaaaaaaacaaattctgtcagtcaatcaactaatattcaagtatttaatatagtaggcttcctgctaagtttcaacaattgtctccatttcttcccactaaattttttaatgtatagtcaagaaggaagagctatctgatgtctagagtgacattctagtgttgggaaatgctagataagatgttcacattttcagatttcccagccacatttaagctcaaaaaatatgaatacttgtccccatgactttcctgaaggtctaaaagatatttctgtctccatcccttcaaaaccaagatacctgattgtgaggagtagaagacccctatatggtccagtgtatgttctcttcaatctcaaagcgtgtttagagtattgccattgctatcagaaatgtgaactttcccctcagatcctagattttcagattaagctaatcttagaacatgggctttcctccttccttatcagaggccactgtggtaaaatattatagaaagtaattgttggccagtcgcagtggcttatgcctgtagtcccaacactctgggaggctgaggcgggcagatcatttgaggtctggagtttgagaccaccctggccaacatggtgaaaccctgtctctactaaaaatacaaaaattagccgggtgtcatggccggcgtttgtggtcccagctactcgggaagctgaggcaggagaatcacttgaacccaggaggtggaggctgccaagatctcgccactgcactccagcttgcgtgacagagtgagactctgtctcaaaaaaagtaataataataattgctaatacctaatgttgcgctttacagctcacatagaacatttacttatattatctaaaatgaggtattaaaatagatgaacaaactgatatctgggctgggagggagttgttgcttcttttatttctttggggtactactagcacagcctgtcagtacattaaaaatagagactttttggcattactttgttttttccaagattaactagcacaacacaaatttcttgtgcctaggtgtaaccagtgttgagacttcacataccacacacaattaatgacatcaaccttgcagtactgacagcgatatcatgcccagtttgtatatggtgtctgggtcatctgaggaagttaaaatagtattgtgatctgtgaacaggccaagtctagcaggtgccatttgcatagactagaatataaatagtatcctctaaagctatatgatgtaatgtccctaaaatgaattatctcccatcttctttcattctcagaaacaaaaatactgattcttgtattgtttgatggaaaactattagttgttcaacataaccagcaaagtataaagacttgacacctaatggcttctgttttctctgagagttagaattagtatgtagcttaagaagagctgtaggcatttagaatgatatttggggtggtggtggggaaatggaggcatcagctagggatagtttagaaccagttctaaattgagtggaattgccaaaattcggtatggtattggataacaaatatggcctattttgacacagggtcttaattttttttttaataggcttgtgccattcttcttaatctaataggcattggcaatccctaattacggagaactggtttgtctagtgacatcccaaacataggaagaatgtttccttctttaaaattttttgatagacacttgagtcaaatgaagaaatcccagatgaaaaattttagaaaggacattctactctcctgtagaatgggaaaattgtcccattcagctagttgtaagccaaaggagaaaacttaaggggttgtattatgcagctacatttttgaactgataacagttacccttccctgtcctttcctgcctaaacagatcctgatgctgcaaaccaacatttctttctttttttttatcactgttgatgaaggttatttaaaacagaatcagtgatatgttagcaaatattttatgactggctttcaggaaaaaagaacatagattcatagcaattgtgtcatggtttaaatactcccaccatcaatgtgaggtcactgaatgtagatttgagaagagctttgtatatgcagaattaattctcattagccaatctgagcaggctccagcacaccactgacagttaaaagaggtggatgactgatgtgagtaaccacatgaatgaatgtcaaaaacattatgctaaaaaaaatgtgctgaggtaagaagccagatataaaagaacatatactgtatgattacatttatttgaatttagaacaggcactattaatttacagtgatagaaatcagatcagtagctttttggtttttgttttattgagaaggaatttggctatgaagggatatgaaggaactttctttctttctttttttttttttttgagacagagtatagatcttgtcactatgctagtagcgccatcttggctcaactgcaacctctgcctcctcagttcaagcaattctcctgcctcagcctcccgagtacctgggattacaggtgcccaccaccacgcccaactaatatttttgtatttttagtggagacagggttccaccatgttggccaggctggtctcgaactcttgacctcaggtgatccacccaccttggcctcccaaagtgctgagataacaggtatgagccagcacacctggccaggaactttcttagatgaaaatattcatagcagcattacccaatagaactttctacagaactatcaacataacaattgtattttcaatctctgcttaggaaaaataaccaaacagcaatttaaagatagcctgtaggccaggtgtggtggctcatacctgtaatcccagcattttgggaggccaaggtgggcagatcacttgaggtctggagttcaagaccagcctggccaacatggtgaaactccgtctctgctcaaaatcaaaaattagccggctgtagtggtgggcgcctataatccaagctacttgggaggctgaggcaggagaatcacttgaacctgggaggcagaggttgcagtgaactgagatcgcaccactgcactccagcctgggcgatacggcgagacttagtatcaaaaagaaaaaaaaaaagcctaatagtaagatggaacccagtatgctagtatatatttaacagtcagctcatagcaaaccaagccctagtttgttgtgttttctaatttctatggtgtaaatactctcaccatgactcaccattcaaactaccaagatgaaggcattgaatggtgagttggaaagagaaatgtacgatcaattcataagctggtgtgaactcagtttctgaactgcttctacccgtcactattattgacggactgaattttcttggttttagtttagttctttagattattcaatctttcccagagctgtgtctttgcccagagactttattgaacctcagagatgtctggctaggctgtagctcaactttagatcctttaacagaaggaagaacacgagggctgagtgcggtggctcaggcctgtaatcctagcactttgggaggctgaggtgggcagatcacttgaggtcaggagttcaagaccagcctggccaacatgatgaaaccctatatctactaaaaatacaaaaactagttgggcttggtggtgggcacttttaatcccagctacacgggagggtaaggcaggagaattgcttgaacccaggaggcagaggttgcagtgagccgagatcatgccattgctgtccagcctgggtgacagagcaagactccatctcaaaaataataataataaggaataacatgcgtatgatccttaaaatatttctgcaactttttttttcccctggtgctgcagcttctattcgtaaagaatggtgaggaacacaaccaagctttaaaatcagtgtacttgagaggttttgttgttgttgtttttacaggtaattaaccatatgttacacattttaatctgcttttaagtgcaagagagattggcaaatgacttaataaagaaatgacttctgcttaaattggataaaatggttgtttactggtgtttattgctgtattccaagtagacaagtaatctgtgaatccagtttagtttattggacaataaatggtactcagaacttttatcagtgtttgattgtcaggatgcccattgaaattgacttcatacttagggaactttaattttattgtacagtatgcactgttaaaaaaaatatccttgtctttcagtataaacctatgacattgccttgtggcattatcatccctgagatgctttcttgctctaagatttcttctatgtcataaagaaaaaaggaacttttggttccttcatatctaatgcagttttttcttttgtaaactctaaatattttccattgccaccatcaacaattcaaataacaatcttactgatggaaagtccatgattagaaatagctgcttcttcaaaaataaagaactttgtatgtacctatccattttgaaaatcttaaccattgtgctcagaaggagagatatgattttaagaagggtcacatttagaataccaataatgtcctactcctgaaataattgggaccaggccgctaaaaagaaagcacctgatgtttggcctttcagtattttctataactatgacgccttggtccaaattatctaataaatgcttcttcctattctcccgccctaagagtccatggtctctttataaagaagaatcatatacatacagatattacttgaatttatatggcatcctcatgaggtgaatcccacctatgtcacttaggattcatttgattgccctggtttgatccaattcaagtattaattcaggccaggtgcaatggcacatgcctataatcccagcactttgggaggccgaggtgggcagatcacttcagttcaggagttcgaggctagcctggccaacatggggaaacccccgtctctactaaagatacaaaaattagccgggtgtggtggcaggcacctgtagttccagcaacttgggaggctgaggcaggaggattgcttgaacccgggaggcagaggttgcagtgagtaagccaagattgtgccactgcactccagcctgggtgacaagagtgagaccctgtctcaatagaaaaaaaaaaaaaaggccaatatgggcccagggcctgccattcagacttccgcttgtggcagagaccaagggatggcagcaggttagtcgcaggtgaagtcataacaagcggtgtggagccgcacctgggcaacatgtcggaaggaaatgcagtgagcgaacccagcactctgcaagggccccgacccctcctgactggggcccaggagctcagcaggcagcgactggcaccccttcaccccgggccgccttcccttcatccgctctgggaaccttaccctgggggttgaggttgggggtcaagaagaaaaccttcaccccaaatatcatcagtcagaagaacccaaggaagaagtaaccgtcaagaaggagaaacatgaaagggacagagatggacagagacaggtgcatggacagggatgaggccacccagaagtgatccagtctcactccatctttgagaagggcccagctgaaatgatgaagaaaaaaggaactggaataagaaagtgaatgtgtcagacatgggaccttctcatatcgtccacatcaaaaaagagaagaaagagttggacgaagacacgaaacatctcaccatgctgtagaaggacgatttcattgatgaccctgggctgaggaatgacactcgcaacatgcctgtgcagctgccactggctcactcagggtggctttttaaggaagaaaacaatgaaccagatgttaaaccttggctggctggccccaagaaagaggtgggggtacctactgtgaaactgaaagaggagctacaagatgaggaggaggccaagataaaggctccttccagagcagccaggaagacccccgggcctcccgaaggacatatccgtggcagagctgcccagggagctgagcctcaccaaggaggaggaattgctgttcctccagttgccagacaccctccctggccacccacctatccaggacatcaagcccatcaaggcagaggtacagggcaaggacagagaggtggtactcatcaagcaggagaacgaccaggaagccaggctggcaaagaatgcttctaccctagctgacctgacagagggtcaggttggcaagctgcccatctgcaagtccgaaagggtgcaactcctcctgggcaaggtgactctggacgtgaccatgggaaccgcctgctctttcctgcaggagctggtgtctgtgggccttggagagagtaggactggggagatgatagacctgggacatgtgaagcacaaacttctgtgttcccccgattttgaatccctcttggatcacaaacactggtaaaatgatcagatggaggaggatggcggctgctgtctgctccagacattttgttctcgaatctctgcaacccaggagaggccagttgagcccacccactccagcctttggcagccattgtcccagtttcccccagggcccacagggcttcctcccacagcagctgtgaatggcacagttaccttcccacagtgtgaagatggtacatccttgctgctggggacttgtccatgctatttgtttttgtatttatattttgtattttgtcttaatctcttcaactgactgcatcctcccaagggaggagggaggatctgtgggaaggtgcaggcttttggtggctgttgggccgtcaggcagcaagtgtgaggactgcagcttttgctggtgctcccttcttcctcccagaggcagtataggagagagagcaaggattgagtctgagacttaagcatggggtcccaactcatcagttcctggttctgtatccttgcgcaaactacctaacctttctgagcctcctgttcctcatctgacaaaaatggggatgatacctacttcacagggttgacgtgaggattacatgggatattatagatgaaaactccttgcacaaggccagaaccagtagccactcaataaatgttaatttccttttaagtaaataaataaataatcaaatgttaattcaaagtcccacatgagagcgttctgtgttttgtggtgtttgttttgttttgttttagagacagggtctcattctttcacctaggctggggtgcggtggcacaatcacagctcactgcatcctcgaattcctggactcaaaggatcctcctgcctcagcctcctgagtagctggaactatagacatgtgctaccatacctagctagtttttttttttttttaatctgtagactgcctctgtggacagtttttcaaattttttgtagaaacagggccatgctttgttgcccagactggtcttgagctcctggcctcgagtgttcctcccaccttggctgagacgacaggtgtgagccactgcacgtggtcagccttctatctttaaacaggatctgaatctagattcatcaactcataaatatgttctcatttttaaatgatggaatgatggaaagtgaaagcaccaatcaaatcatattttcattatttccagaatgtgttcagcacagttaggtctggaaaggtttttgggaaaggttgtgcaaggttgaatttattcactgttgaaatagcacctctaaatttcaagcaattgtatgatttacttttatacaagtgtcagaaatgctaaattattaaatcccaatggcaggatcactgacaactagaaacttgagtttatttgcttccgtggtttactaaactaagctagagaaatatagtacagttatttactacttaagatcagccagaaaatgtatagtgagttcatactgtactagattctgggagataatcaaatgtaaaacatataccagtctcaaggaagttaaaatctagtaggaataatcactatattcagcaataattgttaattgagcacctactctgtactagatacagtactaagagctgggaataagattaagtcataattcctacctataaggagttcaaagtttagttgagaagacatttgtaaagaagtaattgtaactatgatagataccttcctggaagtatgtgaaggttataagtgatggcataaaagagaataatcagttctgcttggaggccaaggactatagccaagaagacatgccttatttggaactaagagtgaaagacaatttgaaatgtagacttgatacatacacaagaataaaagatcatggcacatttgggacatcatgagtatgaccaaagagtaactgactaaagttactcttttggtcagggaaagataaagtttgaacaataggctggattcatatcctagagttaagagttcattcaatagagaaccattgaagagtttttaacaggggaataacatcagatttgtattcatgaaaaagtactctgtttattcatcatatatttattgagcccctataatataccaggcatagttctggatgctagcaatcatcagaaaaaaatattgccttttctatagctcctcttacctaggcagccaagttttgtgccctgagccctagctcctttcctgtgctcagctgagtgaatcagggttaggaacataaccaaaggtagacagtccatagatggtcagtgagctatgagctaaaacagcagaggaaatcagttttttgtctgtctgtttttgatgtaggatctccctctgtcacccaggctggagtgcagtggtgctatcatggctcactacagccccaacctcctgggctcaagcaatccacccaccttagttagcctcccaagtaactgggactacaggcacgcacccccatgcccggctggcttttaattttttttgtagagacagcttgttgtgcaggctggtctcaaactcctgggctcaagcgattctcctgtctcagcctcccaaggctctgggattacaggcataaatcaccatgcctggctggaaaccagttcttcagataagagagtgcagcatgtaacatttaaagaagtagagaccaggttgacatgaacagctttatagtaagattaaagtgatatgcttcatttagtgaacctattaaagataacagaaacctcgttaattcattatacacacacacacacacacatatatacacgtgcatatatatatgtgtatatatatagtcaggtgcagtggcccacacttgtaatcccagtacttcgggaagccaaggtgggaggatcacttgagcctagaagtttgaaaccagcctaggcaacatagggaggcccatctctataaaaaaaataaaaataaattagctgggcatggtggcgcatgcctgtggtcccagctacttggaaggctgaggcaggaagatcacttcagcccagagctcaaggctgcagtgagctgtgatggcaccactgcaccccagcctgggtgacagagagagatcctgtctctaaaaaatttcttaaatgcagtcacacacactaaacaaaggggaaataaggttttagagcagtaattccatctatcattgttttcttggtcatttttccatggaaaactatttttgtattcaaagtcaacactcattctcttatatgtttacattcagaactgaagaccttaactggaattaacttaaaacatttgtagaaaatcagatgcaaacatgaacaaactaagagattttaccacaaacaatgatgtagaggcaggtagtctgcaaggtcagaaccatgccttcagaagcagcaattttaagtgagacctgaatctcctatactcaaaggtcttgcattagtcaggattctctagagggatagaactaataggatagatatgtatctatataaatgggagtttattaagtagtattaactcacacaatcacaaggtcccacaatagaccacctacaagctaggagcaaggaagacagtccgagtctcaaagctgaagaaagtctgacgttccagggcaggaagcatccagcgcaggagaaagttgtaggctgggagggtaagccagtctggccttctcatgtttttctgcctgctttatattctctggcagctgattagatggtgcccaccaagattaagggtgggtctgccttccccagcccactgactttggcaacaccctcacagacacacccaggatcaatactttgcatccttcaatccaatcaagttgaccctcagtattaaccatcacaagtttcatttcaagattaataatatccttgtccatttaatcataaaaaggaatgcttattatgtgccaacttttccaagtgctttatatgtattaactaatttactcctcagaaaaatcctgtaagtacctgcaaatgctattattgttccttttttctttctttctgagacaacatctggctctatcacccaggctggagtgcagcagcactatctcggctcactgcaatttccgcctcctggactcaaaccatcctcccacctcagcctcccgaatagctggggctacaggaatgcaccaccacacctggctagtttttttgtatttttttgtagagatggagtttcgccatgctacccaggctggtctcgaacttattagctgaaacaatctgcccatctcagcctcccaaaatgctggggttacagacacgagccaccgtgtctagcctcctattttaaatatgagaaaattggcctggcacagtggctcatgcctgtaatcccaacactttgggaggccaagttgggaggattacttgagcctaggagtttgagaccagcctgggcaacatgacgaaaactcttctctacaaagaatcagctgggcatggtggcatgcgcctgtaatcccagctacctgggagtctgagataggaggatcacttgagccagggaagttgaggttgcagtgagccgagattgcaccactgcactccagccagggtgacaaagtgagaccctgtctcaaaaaaaaaaaaaaaaaaaagaggccaggcgcagtggctcatgcctgtaatcccagcactttgggaggccaaggcaggtggatcatgaggtcaggggttcgagaccagcctggccaatatggtgaaaccccatccctactaaaaatacaaaaattagctgggcgtggtggcacgcacctgctgtcccagctactcaggaggctgaggcagaagaatcgcttgaactcaggaggcggaggttgcagtgagctgagattgtgtaactgcactccagcctgggtgacagagcaagactctgtctcaaagaaaaaaaaaaggaaaaaggagaatttaatctgattaccagattgtaaatggcaaatctggaatgtgaacccaagcagtctgacttatgcacttaaccacagttatactccctctactctctatggagaatttatcaacttaatttagtcaaatttggttatcagtaccaggcttaagggaatttaaatgtcagttaactgctgtgtaacaatgaatcaaaatctatttattccatcatcacctttttttcaggaaaatagtagcaacattacttgaatgacaactttgggatcatattttactacttctctttcattcatttgtcccaaattcctgcctttgccatgggactctaggcagttgacaaactctgtgagcctcagagtcatcatttataaaataaggttagtgataccttactcatgtgagaattagatgagataaagtatacaaagcatttgatgcagtgctttttcactcagataactaccgttgcattccattgcctgatgtatcaaatccaaacttttgcgtggctttcaaagtctccctagaaatggctagatcccacccatcttgatttatttcttgccttacttgatatataaactttcttctgtctctattcctcttgggacatacacacctttcttttcctctctttttcattatccacatgtttaagacctagtttaagttcagtcttctccgtgaaagcatctccagttaaactatattgttctttcccttttttgaactcctgttgcagttataatagatgttacattgtgtgatatttcacaaattctttgatatatgctaggtttctctttccatctagattctaagctccttgagaagatagatcatgtcttaatatttttcctgtatctcccccagaggatctaacagagtatcataactattgttctatgagatctaatgagctcacagctattgttcaacaaatacttattacctgattgaagaaaataagctcctaaaaatacctgataatattatataggtctttatattgtcagggtgtttttataacactgttaatacttaatccatataatagtcacagaaaataggtagaacagatattatcttcattttttaggtaataacactgagtttaaattacattgtggcttgcccaaggattcttggtaagtagcgttattgaccccaccctcaacccctgccattccagtccattgtccgttctctatcaggctgccaaaataattttcttttgagacagggtgttgctctgtcatgcaggctggagagcagtggcacaatcatagctcactgcatcctcaaccacctgggctcaagcgatcctcccacctcagcctactgagtagctgggaatatagatgtgcaccaccacatccagctaatttttccattttgggtagagatgaagttttgccatgtctcccagtctggtctcaaactcctgggctcaaccagtcctcccgcctcagcctcccaaagtgctgggattatagacatgagccactgtgcccagcaatattttcatatcaaagatgagattgcatcactcccttatttaaaactttccaacagtttcccattttacatagaatgaaatcctgcaaaacccccacattcagtatactccaggtacagtggccttctttagcttcagcagtcttagtttgccaagcttgttgctagtctggggcctctgcacttgaatgttctacccctggaacttcacatggcttgttccttcttacccttgaaatctcaactcaaatatcacctcctcagtgaggaagtaatacctatgtaaattaactcccctcccttgtcacacttcatcatatcatcctgttttattttctgtatggcacctattaatatctcaaattaggccgggcatggtagcgcatgcctgtaatcccagcactttgggaggccaaggtgggtggatcatggatcacttgagctcacgatttcaaggcaagcctggccgacatgatgaaaccctatctctactaaaagtacaaaaagttagctgggcatagtggtgcacgcctgtaatcccagctaagagtagctgaggcacaagaatagcctgaacccaggaggtggaggttgaagtgagccaagaccacaccactgtaccccagcctatgcaacagagcaagatgctatctcaaaaaaaaaaaataatatatatatatatatatatgtatctcaaattagcttgtttatatatttgttacttgtgtattgtctatccccactagaatgttggcctcataaaagcagagtttttatcctattcacatctgtattcccagtccctaataaagtacctgacacatggtagagtcttaataaatatttattaaataaaatagctaagcccgaactagactaaaactatggcttttttgctcctaatcaagtgtacttcccatgaacatttaatttttcctactttttgtggaagcacttatacctttggaactacagtaagaattgatgttcagaataatgacattaagatgtgctgtaggattctctattatcaaagaaaaattttattcagttcaataaactaaactaattaaagcagggatgtcatggcatattattatattaacacatttagaaagatttccaaataaaaagactttctgctttttctttagttaactagaaaattaaattaactcagagctctttatgcctcaaaagtccttgttaattaggattgttctataaatctctattattagcagagttcatcatcttttttattgccctgtttattagggcagtctaagcagggtgtctttgctcatatcctgatatgtgtgtcctagtgaaaagaaaagcatttccggattctcattttttccctattccttgatataggcatatttcatgctgttagtataacaatttagtttccttctatcagttctctccataaagctggaatgatattattgacctatgaagcaaaataattaaatttaaggtctgtttaaaagcattaatgctttgtgacgttgtttatgataatagaagattgaaaatagcctaaaagtccatcagtaaaggattggttaaataaattatactatatccatgtagtggactattatgcagcaataaaaaataatgaggacattctctgtttaccaatatagaaagatatccaagattttaaaatatgatccagagtagcctagatagtatgatacctttttttgtgtgggtgaggggaggaaaaaattaagaatgtagtttattgtatatgcatagaaaaattctagaaggatatataagaaagcaataacagtgataaccagattgggaagtagaaggagcagaaaccagctgaagggcagagatgaggagagggagattttatagcatagcttttcatatgttttatatttttgaatcatacgaatacattacctactcaaaaagttaaattaaaaacaagcacaactaaaagtaatatgtggccaggcatggtgcctcacgcctgtaatcccagcactttgggaggccaaggtggatggatcacttgaggtcaggagttcaagaccagtctggccaacatgatgaaactccgtctctactaaaaatacaaaaattagccgggcatggtggtacacacctgtagtcccagctactcaggaggctgaggaaggatatcgcttgaacctgggaggtgaaggttgcagtgagccaggatcgcaccactgcactccagcctgggcgacgcagcgaaactccatctcaaagaaaaaaaagtaatatgtgattctggactgaattctataccagatgaaaaatattgctataaaatacattaggacaattaagaaaattgaactgtggactatagattagattaaaatgttgttttctgtgtttatcaactataacctggctaacagaatatcatcactcttaggaaatacacactgaagtattaaggggtaaaaggcataatatataccacaaatgctaaataaaactttgaaagaataaataatgttatatatatgggaggaatgatcaactaaatgtggcaaaatgttaaaaaatggtaaatctggataaatgttgcatagaaattgtctgtatttttctgggaacttttctgttaatttaaaattatttctaaatagttttttaaaagaaacaaacaaaaacattttaatactatggatattaccttattataagcaatggcataagaatgtgaagggttctggtttttacgtagtcatacttttcactttctggagaagtttttaccatcacttttctgtttcttccatgcctattgatgctgggtcagaggcagtggcaggggtagtgactgaattttaccttgaggttgaaaaacaccaggccaagtgtggtgactcatgcctggtgtttaggaggctgaggcaggaggatcacttgaagccaagggctcaagaccagtctggagaacacagcaagaccctgtctctacaaaaaaaatttaaaaattagccaggcatgttggcttgcacctgtagtcctagctgctcaggaggctgaggcaggaggatccttttagcccaggagtttgaggctacagtgaaccatgatcacaccactgcactccagcctgggaggcagagtgagaccttagctcttgagagagagagagagagagagagagagagagagagagagagagagacagacagacagaaggaaaatgaagaaaggaaggaaaaggaagagagagagaaaagaaagaaagaaaaacacctgcctacctgcctttcaacctgctggatcaccttcacttgtatcttctcaacagtttaggacatcaacaaaacagtaacaatgtggcattttaaaaattctttgaacaaaattttctaaggatatcgtgaggttgtgtgtatctagtgctaaaatatatagttaatttagtggaggtaaacctgcagaaacatttaattgtttggcattgagtaactggatttgtattattgttcaattagatattgtggcaattgtagaaacttaaccatctctaatataattgactttcattattgatgcatgaagatgtttttattctaattagattggcctcttaagtgattaggtagtgaagcttgtctcatatttaagtgaagagtaaattatttgtatgaagtgtctagaggatgcctaaaattgattattttgtattctaggtaagctaaattttattgttttgaatgaaggcactctgcaagtcttatctaataaatgacacaaaacaaatctgttatcaactgaattgttagtgtttgtttcctgtctgcttggggaagcttatgatttagtggttttttagaaatccagaaagtaggaataataattattcccaacccttttccttctcactttacaaaaagtttgtgaagaattgagaaataaatgctacgaataatcttaagctcttaggtagaagtacttgatcaaaactaaccaggtcatttttctacaattagtgcagaaagctagtttttactaattgttcccacagctactccaggcccatttcatgcctaagaaaactaggtcccagtgagagtcatgtgagtgttgtaggcttcattggttgaataacgtccttacctgtaagtgtatattcagatttagtgaatgtacttcatgtgttcatataataaatttcctagaatagctatggagtaggtcatgccggtaaaaactgttagttttgtgacttttttttttttttttttttgagactgagtctcactgttgcccaggctgaagtgcagtgacatgatctctgctcactgcaacctccgcctcccagattcaagtgattctcgtgcctcagcctcccaggtagctaggattacaggcacatgccaccatgcccaactaattcttgtatttttaatagagacagggttttaccatgttggcgagtctggtctcaaactcctgacctcaagtgatccacccgcctcagcctcccaaagtgctgggattacaggcatgagccactgtgcccggccatgactttttataatagatctgtaaaccagcttaagtcatttgaaaatcagagcatactgaaaatgtaataaaacataaatattattgaagatttttcagagtcatcattttgaaaggagttcttgtagttctttagataatagaaaataatgaaaactgagtttatgacgcatcttttgcatatatgatattcttatatacttatctgtactgataagtataaaaaggtagaaaataattctactttgtatttcaggaaattgagcttcatatgaaaactaaggataaagtatctcaatgatgtgtgtgtgtgtatatatatatatatatctccagaaaaaatcattataaagctgcatttatgtagaattttcagcaatttagataaataagtcatgatttttttttttttttcctccgagagggagtctcactctgtcgcccaggctggagtgtagtggtgcgatcttggctcgctgcaacctccacttcctgggtttaagcaattctcctgcctcagcctccagagtagctgggatttcaggcatgtgccaccatgcctgacaaatttttttttgtatttttagtggagccgggattttaccatgttgcccaggctggctgaactcctgacctcgtgatctgcccacctccacctcccaaagtgctaggattacagatgtgagccaccatgcctgaccagaagtcatgattcttaagaataaaattcaaaataatctcttccgttgtcgattaggttctgttcataaataaatatttatgcagtcaaaaatgaataattgttttcaaacgaggagctcaaggaattctatgtaattttggtttacttactatttatatataattattttccaatctgtaagtctagtgattaattcttatattacctaaaatgttttatagacatgttagattattacataatgtaaatgtattgtaaatagtaatggtttcattaacttgagctcattttacttatttagtacctgtttggttttagtttatagttgttatttccctgtatagtgtagcttgtacttggaagtagtaaaaccagatttctttataagtatttatggtacagaccttttcctaaatcagactgcagacctttcctgagtatttctaataaagtctgcttacattttttttttggcctgcatagtagtttgtgctatatatactctctagaaaatgtaattctggatatttgtgccataactttcaattaatcaaaatcttgtcaactgccatataggccctcatgttacaaaatgtggaaagttcagttacttaaagagtttggctgggcattgtggctcacacctaatcccagcactttgggaggctgaggcagtcagatcacttgaggtcaggagttcaagacgagcctggccaacatggcaaaacctatctctactaaaaatacaaaaattagctgggcgtgatggcacatgactgtaatcccagctacttgggaggctgaggcaggagaattacttgaaccaggaggcggaggttgcagtgagctgagatcacgccactgcactccagcctgggcaatagaatgagactccgtctcaaagaaaaaaagtttaagccagatgcagtggctcatgcctgtaatcctagcactttgggagaccaaggcaggaggattgctcgagcacaggagtttgaaaccagcttgggcaacaaagtgagaccctgtctctacccacccgccccccaaaaaaaagcaaaaaattgaccagctgtggtgctgcgtgtctgtggtcccaactacacaggaggcagagagaatcccttgagcccaggaggtcaaggttggagtgtgttatgattatacaactgcactccagcctggatgacagagcaagacctaaaaaaaaaaaaaagattttaaaaaagattgactaagtgaatgagtcctcttcttgaatatcagtcattccaggagagtattttcattaacatatttatgtctcttgttgaaagtatccattaagagcaggtagcaaaagctagacagaatatgcttttgaagattctctatgctctttattaatacctttcttaagtttctcaagatctccttttgcctccctcttgatcttaaacgagactgaagtttaagagtctttagccactctgtccccatagggatgcaaatttatgatttcagaagttccagcccccaataagaagcactgtccaatcgtttgcagatgtatcttgtaagccagatttcatgacagataagtccattccactgtcatgtgccatgtttaaagtactaaattaggttactctgtagtcaaaacaagtaagccctggtccagactactctagggcaaaatcccgttgcactgtcccttttgttctgcccatgcattcagttgtagctttcccttttgccagttgacagatagtgacttctttgcaaaacataaccagattaggttatttttagtaaaccaactaaaataaaaaattcttgacattgggaagaagtattttaacagaataatagtaatgtttttattgtgccattgtgattttctataaagaaacacccaatattcattatttatatttttttaaatttacaactctttaactgtatccaacatttcactgccaggaatatagtcaggctcgaagcttttttagaaacccatgatccaatccataccaacacttcctttagtttatggcttctgttcatttgcactgtccagaaaggtactgctaccatttgtagtcactccaaaaaaaagtgtgaactacctaggtataactctcataagacgtatacagcagcatctgtatgctgaaagttaccaaaaaagtattacttgcagatgattttgcaccttagttcccaagtgcccctgtacagaatatggagcttatgtcctgtctctctttgaatgatgagtgatgaaggagcttcagatgttactgggtgagcttgtattgagtgttacaaagagaagtcattctgcctttctttggctctaattgcagaaagtgaagtcactgcttttgctgtcttggatcaagaccagaaagaaattattgataccaatggagctggagatgcatttgttggaggtacagactaatttatttcattcttacttacaagtaaaacattttaacccttgtttctaccatataaccaagatttattcatttagtaacttctaatttcttcttttaaataattaacttctgaagttctttccatatacttctatcattgtcagtattagagggttttaccagaggaaaaatatgtgtttggaaaagataatttgctactatgctgtaccccagtcattttcacaagattaattgtatctgtcagaaaattgcataaacaaactgcatcaagtacagtatatagtatattcatagcccttcaggcttaaatgttaacacatttttgttctttaaaacaagttgtgatgaatattaaacagtatgctaataactaaggatgatgtcttttgatgataatcctttggttaaaacatctgtttcaaacacaatagtggttgtttgttatactaaaaagggttaaatttttgcctatttttggctcaataagaactggcaaattttatgtgaactaatgattttggtaatgaatactcaaaaataaaatcaaaacaatagaagacttggcttgatgacttagattgatctaaaatctgattcaaaaattcttttgataagtctaaattccttctagttaagtgtagttaattaagctagtttatagtctctagaaagctttcgcttcctcacagataccccaaaggggtctttcctggtctctgtttctttctcttaacatcaagccagaccaggttaatttaaaaaaaaaaaaaaaaaagcaagcaagtggagctgatgattgtccctttttctctggaggataatttgaatcatgggaaacttatttaagtttgtgtgatggttttaacttaatattttattttaatagtcttttgccaacataaatttttatttttctttctctaaaactattcatgcccagtcttttttttttttctcccaggctggtgtgcagtggtgcaatctcagctcactgcaacctccacctcccgggttcaaatgattctcctgcctcagcctcccaagcagctgggaccacaggtgcatgcctccacacctggctgatttttgtacttttagtggcgacggggtttcgccatgttgggcaggctggtcatgcccagtcttaaatgaactattaaccattaggatgccccatgcccttgttctttggaaagagtctgtaccacagacaacattctacttcactgttatgattgtgttttttatttccttgctcggaaagtcttcattattgataatattagagtacttagcagccaattttcctattttttactttttagagctatagatgtatgtaggctaaaatattttattctgaatttaaccatattctgtaatacattaagaaaaccctagtgatttcttggttagaaattggtcaaaccaggaatcttagtctagaaacttttaaacttatacactgtatgtacattacttaagtactttaaaatctttaaaacatgaagtattctatttctttgacattcagtgggacacataatgaggccatcatagatttgatggtgacctaaatagccactacctctggccttgggttacttggcttcctggcccggcaacaacagattctgttacagacacctaactatctgtaatgctaccgatactaggtgagaacatgtagactttttgagggagggagaggccattcttaggatactgaggtaggaacagctagctaccatttgtattgtggttacaacgataaataaactacttcatcaaagcaattgggatttttttgttagaggatttttcagcctctttttatcctacttcattatatttattgttggggtatagttaggtaagcaaaaaagaaaaagagtatagaacagggatccacagtcgtcttttttaaaggccaaatagtgactattttaggctttgcaagtcatatacaggctgtattgcatatcttcttgttttgtttgcttccttgtgttttgtttttttacagcacttttaatacgtaaaaacctttcctagctctccagctgtacaaaaacataccataggccagagttggcctacagactatagtttgccaaaccctctttaaatcatgggcagcttcctcactttattcatttctagcatttcaaagctccagacactggatttcactatacattgttgaaatcagaatagagaaagtagaaagcaggtagaaactaggcaggactttactggtaatacaattagatagccatttttctcactttgaacctactcagttcccagggtaatcagatcccaaaacactgggtcatgcaatgagatgaacatcctaatgtcagtttattaatagaatacttatgttgccatctttagcacattctgtcaaatgtgaatcaagctacaaagtaatagcaatagataacttttatacagtacctactaaccaaccaatatcttaaacactttatatatatattaactaatttagtgttcacaaaaacttcttggggtagattatttttacccctattttactgatgaaaaaaacagagacaaagaaaggtgagataatgtgcccatagtctcatggctagagagtagcagagccaggattcaaacccagaaagtctggctccaaagtcagtgcttttactcaccacactaatactgcttctctaaacatttatgtaaatctcaccattagaactgagaaccacagaccagccttcctgacaaaagctggttttgccagagaatcttcctgttatctgagtagatgacttactttattgaaaaggatctgttgtaatctgacagggttctggggactctaaggtaagattgttgaggaaaagaaagaaaaactgaaagggaagagaatccaagaactgtagtccctggtgagtttcaaccaagagctttttgctaagcagtagaatcgattgcactacagagatacagaaagccagatgataaacttgcttggttagcatgggctccaaataagagagttatatgaatcagctgtttaatagtgaagcaggatatttccctaagcccttctcaggcagaaattgcagtgtgtgggcgcaggaactagccagccactttggtgccagcaggagcgaacttcactcactcgcttctccactgctcacaggagggtgagcacacgtgagcaggtgcaggagctgggctgagcgcttttgggcactggtaagagcgaactccataccagaccagtggcagcatctaagggaagctgcccgtgacccctggatccccagaggaagcgttacagtgcccttttagctttgctgtctgtagacagcttaagcattaacagctcagttgagtgaccctccattgtcaccaatgtgacagccctttgcacccacactcatggcacccgagttcttgtccggcatccaggataaatgaggtcacacaaacgagttggagatggtaaatgcaggggattttattgccgatgaaagtggctctcaacaggaaggggagctgaaagggggatgaagcaggaagataatcccctggagtccggtcatccccagccagactcctctccaaagctatgccatcaagctgtccctctgaagtcaagccgcttctctccgatgtccaaccgtggtctacaacatccagctgcttctcctcttctttctctgttggctgagcctggggtttttatgggcacaggattgtgggtggggtgggccatgggtgattttggaaaaggcaacatttgagcaggaaaacaaggatgtaagttctcactttgggccatggtattaggctttttggctttaggatggggcgctcaccagagacctaccctcttctgcccagaaatttgcctgcctcctgtccctatcaatagcacccatctaacaactgatgcatctatcttacaacagaaatggtcttgttagttggaaatactaaaagatccattggttaaaaccccctgctccctctccacaccagcaggagcctttctactgggattggaaataacagctgttggcttgacacagtggctcacacctgaaatcctagcactttgagaggccaaggcaggcggatcacttgaggccaggaatttgagaccagcctgaccaacatggcgaaactctgtctctactaaaaatacagaaaattagctggtcatggtaacatgcacttgtagtcccagctactcaggaggctgaggccctgcccgtatggaaaaattaacaaaatggatcaaagacttaaatgtaagtactaaatcagccaggtgtggtggctcatgcctgtaatcccagcactttgggaggccgaagcatgtggatcacttgaggccaggagtttgagaccagcctggccaacatggtgaaaccccatctctactaaaaatagaaaaattagccgggcatggcgttgcatgcctgaagtcccagcaacttgggtggctgaggcaggagattcacttgaacccaggaggcagaggttgcagtgagtcaagatcttgctactgcactccagcctgggtgacagagtgagaccctgtctcaaaaaaattaattaattaattaataaaataattgtcgttgactccttccaccttgggaatgaatctcaggcagtggcaacttttacatttactatgtagtttatttttcttcgcttcattgcccaattaacatatcttctttctgattgacacattctatatttggatggttaatatattcatcctgtaactttcaagttttgctggcctaagagtatttctgtcttttgtgactttgcatatctatattttagtccactttgtggtaatttaactctctgaaggacaataattttctttgcataaatttcaagttttggataaagtatcactccagctaccatgtgctaattatctatatcagtaccagagtgccatgtgttcctttagccagctaaaaagatatatgactacatcatggattttcatgtataatttaaaaatgagtaacccaaatgtacataaattaaattaaattaaattcgtagttccatctcacgggtttagtgacagtaacaaatccctccagcctctacaagcatcgctccttgttctatttggaggtcttaagcactttgtgatatttgttctttatttgtcactgcccagccctgatagaactaatcttttcacattcttcctcaaaagcccaagtgctaggattgtactcttggaaatggatacaattctataatctctaagtatgatttcctaatttcctaggtcaggaaaaaatttcttcctgttgtcctgctgtgctttgtcacagcaggtctaccttttcatttggaaccctctttgtcactgccatagtaacaaatggaaacattgagaacattttgtgacaggcactgtcattgttcccagtgaaatctcttcccctgtgtcttcccagtaaatgaaactgagaagaaaaatcataacaaataacatgaaagaggacctaatcaatatgttcccactgggctgtcaataccagcctgtgttaatctaatatgatttagtcatatgttttatggcagctgtgggaatatggacaggacctacaaatcatctttagactgaaagtgagtacacctttgacagattatgtgtaggcacttatatacaactctcagataaaagactagagacttcacccaagaaccaacattcttagaattaaaaaaaaaaaaaaacaccttcattaagtatggttaaaagccacgtatagattagaagattttactttgttggttttttttgttttgttttcgtttttgttttgagatggagtcttgctctgtcgcccaggctggagtgcagtgacagaatctcggctcactacaacctctgcctttcaggttcaagtgattctcctgcctcagcctcccaaatagctagaattacaggcatccgccatcacgcctggctaatttttgtatttttagtagagatggagttttgccatgttggccaggctggtctcgaactcctgacctcaggtgatccacctgcctcagcctcccaaagtgctggatttacaggtatgagccactgcacctggccagaatattttatttggaatgataataaagtaactgtgctgactcataatactttttttggagggggagatggggtctcactctgtcacctaggctggagtgcaacagcacaatcatagctcactgcagcctcaaactcctgggctcaagccatcctcccacctcagtctcccgagtagctgggactacagggtttttaaaaaatgtttttgtagagacagagtctcactctgttacccagtctggtcttaaactcttggcctcaagcagtcctcctgcctaggactcccaaagtgctggattacaattgattaaaatgacaattcatttgggattacagacatgagccaccacccccagccagaatactctttattttaaaaatcctcacaacagcttcagcagagaaaatgtattacccttaaaaatattacctataatatgcaaatgactctgaaaaccactcagcaatcacaatgcaaataattctcctatttcccatctaataaaaaggaacactaattacattctctaggctgggagcagtggctcacacctgtaatcccagcactttgggaggccaaggcaggtggacagcttgagctcggcagttcaagaccagcctggacaacgtggcaaaaccccatttctaccaaaaataaaaaaattagctgggcatggtggcataagcctgtggttccagctactccggaggctgaggtgggaggattgctggagcctgggaggtcgaagctgcagtgagctgtgattgcacccctgcactccaggctgggtgacagagcaagaccctgtctcaaaaacaaacaaaaaacaatttcattctctaattcatgtttagaaaagaacattggtttacaaaaaatttttaaagagttttttcagaacaaggatgccacttcctcttcatgtggcacctatctatacttctgagaaccatgaagactctctaattatcttcatattttctatcctcaccttgtttctttggtcccaaacatttatagcttccttccccattcttcttaattgctgcttcattgtgctatgcatagaagtggtgcagaattcttgggatttgttttttctacactacccccttcctttgctctccatctcagaagactagaagacaacttggtaagtgttgaatatattgtttctcagacttcttcactcaaaaaccaaaaccttcatatgacccacatctgctgaggatttacttgatggtgaccaagatgacagctgcccactgctaaacaacccaatgtcaacaactctttttcttgtctttctgctctaatgggacatcttctctgttttatttcttgaacagaaatttttcttaaaaccatcaaatgaacagtgaaattggcttggtcattaggaatatgaaacagaccaggcatggtggctcacacctgtaatcccaacactttgggaggcagaggcaggaggatcacatgaggccgggatttcaagaccagcctgcacagcacagtgagaccccagtctctacaaaaaaaaaaaaaaaaaaaaaaaaaaatagccaggcagggtggcatgtgcctgtagtcccaactactcaagaagctgaggtgggaggatagcttgagcccaaaaggttgaggctgcagtgagctgaggtcacgccactgcactacagtctgggcaacagggggagaccctgtctctacaaaaaaaaaaaaaaaaaggatatgaaacattcaccacagatagtagttcaggttcatgcaacagaaagcaagagagagctatacccttgcacagtgataggatgctttattacatgccacactagtgttatacatccagagtcttagtcaagctgaagctagaccagcaccaaatttcataaacactgtctatgattatttgagccttcgttagttaaaaaaatgtaaagattatcctctccagccatgatttaaaaaaagagagagagaaatcactttgttcatgtgaaatacaggatgattttagagtgaagcctgtaatttctcatcaacgcaaatgttccctcaaagacctaatatcctgaatggccttcatctagaagcaattgtaaatagataatggaattgaaaggagtttatcttctgggaatgtggataagacacagacagtctgaaccatgtaggctatcagactccaaagctcagatgtgaaacttaggtttcttatatttgatgattattgagaaatatttattctaagaaaatgatgttgatatggaaatttttatttagttgcagaggtccacaggaaatgtagtaagtaaaatttctgaagttcattttcttaaacagaattgtgacataacaaaatatatgtgtgttagttccctgacctagaatattggtgagccaattggaagtaatttgaatcctaaaattctctcagctgctattaaatgaatctggtcaattttacctgtctgatacatccaacatgtatcagttagcttttactgcataactaaccactttcaaaacctagttacctaaaataacaactcatttatttagctccacaaatctgtgggttgacagctgggcctgtgcttacctggacagttcctctggccttagagtgttgagagattaagtaatttgcccaaggtcatattgaaagctaagattcaaactcaaaatttggcctcaaagttcttagccctagccattttgctatactcccttttattactacaacatcttagcttcctctctaaaggaggagaaatagccaaagtggttttataaacactggtctgtcgactggtaccagtctatgacataagagttttcatcagtcagtatcaaaatgtaaaaaggcaggggcaagaaagtaaatttccataaaactaaatgtattcagttttaaatcttgcccttcctactttgagggagttcagttttctttctttatgaataatgttggtaatagtggattttttaaaaatgttcttatctagcagaattaaagtttgccagctctgtgtttatccctaaaatcttttgggcaagtttcaatgttctgtgaaatcccaaagtctgggattcactgatcaaccatattttttcataaattctacaaaattatttggccttttttttttaatgccagtaaaaaattactgatgacgtgaatgccattcatgttgggcttttctaatatctggcccacttcttcatataaagaagatgagtataggccaggcgcaggggctcacacctgtaatcccagcactttgggaggctgagacaggtggatcacttgaggtcaggagttcgagaccagcctgaccaacatgatgaaaccctatctctactaaaatacaaaaattagcaaggtgtggtggtgggtgcctataatcccagctactcaggctgaggctggagaatcgcttgaacccaggaggcggaggttgcagtgagctgggatggcaccaccacactctagcctgggcgacacagcaagactccatcccaaaaaacaaaataaaaagtaaagaagacaagtatagaactgtaagttctatacttactgtaaacagatgagtacaggccgggcacggtggctcacgcctgtaatcccagcactttgggaggccaagacgggcagatcacgaggtcaggagatcgagaccatcctggctaacaaggtgaaaccccgtctctactaaaaatacaaaaaaattagctgagtgtggtggcagacgcctgtagtcccagctactcgggaggctgaggcaggagaatggcgtgaacctgggaggcagagcttgcagtgagccgagatcgcaccactgcactccagcctgggcgacagagcaagactccatctcaagaaaaaaaaaaaaaaaatgatgagtacagagcaataagtataatatgatgtgatttgtattttgttaaaaatggtcttatgtgtgtatgttgtaggtatacttataaaagcatataaaagttccaggaagaaacactccaaacagctaacagtggatgtactgggaggtggctgaatgaaataatcactttctactctgtatgtctgaatttttttttttttacaatgtgcccttattggctttgtaattagtgtaatctttaaataaataaaatcacatgtgtgtagcactgatgcagagcctagccaaccttagtacctagcagaaatcttcactgtggtaaataagtcatcagacacagcatttcaaactatacgataatttacataaaacataacctctgatgttttaaggctacttatcagcaaaggtctgaataaaacaaaattagcagcatgattgtcaaattaacagctactctctcttcagatatataagttctgaaaccaggggtataaacacaggcttttaatttatttttcatttaattatccaattaacgttgacattttatagaatttagatatatttctagcccacaaagtaaatggcaaattaaaaactgatttctgtcatcaaatgctcttaaaattttagaaccatcatgctatgagaaattttcagttgatcaaatgtaggtttttgaattgagttaaataataacaaaatgatccttcttatgaattagggcataagcacagcttcacataaacaatgttaccatcatcttatcccagcagctattactttgccccattgaatcttttgtttttaactatatcatttagagtgtttgtgctgaaaggaaaattttaaaaaatcatattttctggttttcagtttccagtagtgaaactcttttcaaatgagatcttatctgaatcagaatgaaatgaacccacaaaaattaaaaattaaaaatgtttttaagaaagaatgaaatgagattaaacaaactcccatttgtccctatccacattttatttggtggctcatgatgtcacgtaggaaaaccatgacctattcaaaagcccctatttgatgaatgaagaaagtaaggcccaaagaaaggtaagatgagttgtccaagggagttaattgcaaatacgagacaagaagccagattactgaattcatgaagcagcagttacttgtgttcataatccaaatgaaagttgtcagttaaggctgagcgcagcagctcatgcctgtaatctcagcactttaagaggccgaggtggacaaatcacttgaggtcaggagttcgagaccaccggccaacacaacatggtgaaaccccgcctctactaaaaacacaaaaaattagccaagcctgatggcgggcacctgtaatcccagctacttgagaggctgaggcaggacaattgcttgaacctgggaggcagaggttgcagtaacccaagatcacgccactgcactccagcctgggcgacagagtgagactccatctcaaaaaaaaaaaaaaaaaaaagttgtcagttaagctgtctgttatttagtcctcttggaaacatataggtcaagagtcaatatcccaaatgcacagaaggaggggttttttgttttgttttgtttttgtcttgatgtttgactttaacaataaacagaagcatacgctaaacttttattttgggaaccacatcaaaagatcacacattagctttaaaatcaaatactgactcagtgttgtacatctatgctccatgaagaagaatgacttttaaagcagtgttttgaaagggattagggtgaaagggcatcttatctatatgagtgcaaaatactgcttagcagtactcttcaagagctttcttccgaaattaagatcatttttaaattgatgggcttttggttttgtttttaattcaaatacaatgtcccataccatgttaacagaacttagtaagcttccatttttagccaccacaaagaaggaataagaagttattctcaaagctgtagctataggacaataaagttattctttcttatagctacagtactgaccacttgcctgtatattacacattgcttctcagttgctcactttatgtgggagggtgtgttgtgctgaactatcttaaagcaacctttgctctaaattgacttcctgtacatgtcaacaattaacaccatctgacaccaattaagctttagttttcttttcttttcttttcttttttttttttttttgagacggagtctagctgtgtcgcccagaatggactgcagtggtgtgatctcagctcactgcaacctctgcctcccaggtttgagtgattctccagcctcagcctcccaagtagctgggactacaggtgtgcaccaccactcctggccaacttttgtatttttagtagagacagggtttcatcatattggccagaatggtctctaactcctgacctcagatgatccacccgccttggcctcccaaagtgctgggattacaggcatgagccactgctcccagcctggttttcattatgcaaatacctgctaggtcagaccttaccctggcaggcacagtagctttttcagttatttcaaaatttaatatttattattttccctgaaaaatcagttttctaaaatttgggtcacaagttgttatttgagttcatgactaattggtagtcaatatgaagtcaaaacaaaattttactaactagactacatagaaaatacaaaaagtttacatctgagcacttttcagcagggggaaaccattactttgtcacatctggatattctaagctagccaaattgaagtgggaatttcctgccagatgttagttctttgagcaacctgtgaacatctaagtaagtgaggggttatgagtccttgtttggtagagctatacccactctggaggcttgctcctaacaggcagcagacattttatatgtactaccaccagtcaggaggttgtgcaacctatttgaagtcaatatgatgtgctcttgttaaatgtcaaaacatccaaggcctcattttgaatgtacaacatcagtcttacagatattatatccagggtgaacattgcattgaaatgtcctcccaaatgtagatgacaaaaattttgtttcattaatagaaagaaggtaagactgaaacaccacaggtattccagataacttggatagggccattttgtaaagtcagtgtagaccaaaatatgtctctaaatatgagggaaataaagaatctgaaatgacatgaaaaataccaagtatttatatcaacctcctgttctagacgcacatgggaattaggaagtgaaaatttcattcagaagagctgtgcacaaaaagtggaaatgcattattcaattgaaacaagtaacatttttaagggggataaaatactttctacatgatctcactggttttgtcgtcctccgtaagggaaaatattgacatttaccagactgtttgctccagctttctgatctcctgcagtttatttttataacaaccttatcgatgggcctcttacccagctctctaggtttaactgagttgagtcgatttgttaccacagcttcaagtagctgttacagaacaagcaagacatcctaataaagctgtaaacgtgtttactcaaacagagtattgattttacttggaggggaagaagccggttcttagcacagtgtcagggtggatgaatttcactgcagtttttcattgtcatctgtcagggttgtgaaacactaagtaaagccatcagaggataattagaagtaccagaagtttagcccctaaaatcagttaaccacttgggagttttgtagcttaattagcttttattaaaactttccctagtattaatagccaagcacttttaatggtatttccaagtagatcaagatatcaagattgtgacttgttaaatatatgaatttaatggctaagggtttttcagaccttttctcactctaaattaggctaccactagaacataattagaaccaaaaccaatgtaaagatacagtgatctgtacttatactagcagaataaatgcatgatttttttttctgaaaaatcaacttaaaagaagtagtaaaacaattataaaataatttaagccaggcgcagtggctcatacctgtaatctcagcactttgggaggccaaggcaggaagattacttgagcctaggagttcaaaatgagcctgggcaacatagtgagactcccatgtctacaaaaaattaataaattagccgggcatggtggtgcacacctatagttccagctactcaggaggccaaagtgggaggatcgcttgagctcaggaggtcaaggctgcagtgagccgtgatcacaccactgcattccagtctgtgtgacaaaacaaagccctgtttcaaaaaacaaaaataaaacatgtctttgtagaaaaatccagtttgcgtctttattacacttaaatgtttttgtaacacaatgtgatctaaacacataaaactgtcaatgccacccttatttttaaataccttgattaaagcagattctaaaatattctagcttactttaagttagtcattgtcttaacaataaaagctgatgcacgttgtgcaaaaggtaagcatcagagtaaggagttgcttaccttctgtagaaactgcattagctactgagcttcatgaaaagcattcatgtgaacactacctgacctcttccaaatgtctagaaaaacaaatcacagttgaaaaaaatcacccacctagaaaatgaacaaaaaaactggaaatttattaaaaataagtttgaccttctctcatgatgctgcagtcaagcaaaaatgaaaaataagtttgaccattatatttaaagtacatcttcccatatctaaataattcatttagtgctttatggtaaactttttatgtcttcttgcactactgcctcggcctgtctaaatgactaataaaaattatgatatctctgggatgaccagttctaaagcctaagggtaacagactctgtcagaaagaacagcaaaagatgttgggttttctttgtctttgaaatgctttgtcacgtgtttatctgtgcatatagttctaagccaaattctaccctgaattgctttaagccacaaagtagcaggttgtaaaatattgttgcataagagggcacctctagagcttgctcttctaatttttctaaaggtagaagaaattgacttttcacaattgtatttagatcattcttccatattaaggtattcaaaaacagaaaacataaaggatatggatttatgattatatcatttttatgtgcatttcaaaaggcccacaatacagtaatttattttattctatgcaattttcttgagaatgacagcatgtgagagagctcgttggatggggaggggcagtatatagtagggtagccatatttgagcttcaaggcactgtttactctgactccttcagtcaaaaggagcataaacccatttcacctagttcaggttaaggaattttttttttgtaaggaagatattataacagtggttaagacactgggtcaaaatatgtggggttttttgtttgtttgttttggttttttttgaggtggtgtctcgctctgttgcttaggctggagtgcagtggcgcaatcccgactcgctgcaagctccgcctcccgggttcacgctattctccttcctcagcctcccgagtagctgggactgcaggtgcccaccaccacgcctggctaattttttgtattttttagtagagacgaggtttcaccatgttagccaggatggtctcaatctcctgcctcctgatctgcccgcctaggcctcccaaagtgctgggattacaggtgtgaaccactgcacctggccccaaaagatgtggttttaagtcctggtaccacattaactagttgtgggactgctgtggtttgaatgtgtcccctctaaaattctagcattgtcaatgtgatagtattaagaggtggggactttaagaggtgattaggccttgatggctcctctctcattaatgggattaaggcccttataaaagaggcttcatgcagcatttggctagcttgctcttccactctggcttacccttccaccctcacaagacaccaaatgccaacagcttgatcttgaacttcaaagctgccataattgtgagacaataaatttctgttctttatgtattacccagtctcaagtattctgttgtagcagcacagactatgagagagactatggaaaagttaattctcttttttgtttgtttgttttttgttttttgtgtttcttttttagatggagtcttgctctgtcaccaggctggagtgcagtggcatgatctcggctcactgcaacctctgcctctcgggttcaagcgattaccctgcctcagcctcccaagtagctggcgactacaggtgtgcgccaccacgcccggctaattttttgtattttagtagagacagggtttcaccatgttggccaggatggtctctatatcctcacctcgtgatccacccgcctcaacctcccaaagtgctgggattacaggagtcagccacagtgcctggccgttacttaacatctctaagcctccgtttcctcatttataaaaatgaagataatgagtacctatctcatttgggttattatgaaagttaaatgaagtaatgtttataaagcacaacacctgatacatagtaaggattcattaagtgttacatattataagaggggtctcaaagaagtctcagacaagagccagaatgacaagttttcactgaaagtatagccagatggtgattgtaggttcaagtcagttctggagacctcagcagcagatactggatcttcactccagttcttcactaattaatcctactcagctgcattacgtgtctgcgtcttactgtctcacagtcagcttcccagcctgtctttgttttccattctggctcctaaaagagaacactgggttattagctcaattcactttttatacaatgtcatcagtaggacactaggagaaccataagttgtttgcccttgaacgagatgcctaccctttgttccatttaatagtaaaggttgaatttacgtgcacaaaacattctgcagtgctggaagtgatttttcttaaaagggtaatacgtggatgggctctataaacattgtgtttgcatgccttgtccactaccttcttcccatatttatagttctgaaaatgttccctacaacgtgatccatctatcatacaatacatggaacatcaaacagcttgtatctcaagctagaaacctagacgcccttcctgagtccttccattccctctctccaaaccgtcagtgagttcttttgattccgctttaaggatgtatctcaaatttgtccacttctatttctctgtcatgactttagcttaggcctgttttccacttactgtagtagtttcctaactgatgtctatgccttcactctttctggaactttattccattttctgtataatagccaaaataatcactttaggaagaagttgaattatttcattcccctgcttacaacctttccgttgcttctcactgcacttagcctaaaaatccaagctcctgtggtgatttaaaaaaatctatatgatctgctatgtttgtatctttatttcattccattttcacctttgcctgcatgatgtagctatactgtcagtcttctttcaggccttagacactttgtacagtggagtttactttgcctagaatgttcctcccctactctttaaaagtcaactcttctgtaatcatcctatctaaaatgggtcccttgactaatattctctcctgttactcagttctttttcatagtagcacttaacactctggaattgtcttatttacttatttgtttacttgtttttgtctatttcccccattacaatgtaagtttcagaagaacaggaactgtaagtgtcttatttaccagcgtatccccgggacccagcacagtgcctagcatagaagactcagtaaatattagttaaataaatgaatatatcaatcatatgcacagctgcaaaccgatttgcccctaccatcaagtaaagaccatttagtcggtatttctaggaatttggttattgaggtatatcataagaaggggttagaataagtcaggaaacagagtaggccatactttaggatcaggtcaacttggtttaagagtaacccacgctaggccaggtgcagtggcttacgcgtgtaatcccagcactttaagaggctgaggtgagacaataaactgagcccaggagttcaagaccaaccagagcaatatcgtgagacccccattggtatcaaaaattaaaaaattagccagacctggtggcaaacacctgtagtcccagttactcaggatggtgagataggaggatctgttgagcccaggaggtcaaggaaacaatgagccataatcatgccactgcactccagcctgagtgtgtatgtgactaatccagaaacagagagactgatcatactacctttagtatcacttaaaataaaggatgctgggctggggggcatggtggctcacgcctgtaatcccagcactttgggaggccgagaccggatcatgaggtcaggagatcgagaccatcctggctaacatggtgaaaccccatctctactaaaaatacaaaaaattagctgggcgtggtggcgggcgcctgtagtcccagctactcgggaggctgaggcaggagaatggcatgaacctgggaggtggagcttgcagtgagccaagatcatgccactgcactccagcctgggtggcagagcaagactctatctcaaaataaataaataaataaataaataataaaataaataataaaggatgctatggagagaatacatgtgttaggaaagaaggtagtatttaataataattgtactaagtagttatagtacagatacaaaaaatttattctcaagatcataatcctgaacatcagttcctgctgtaataggcagtaacatacaggtcagagactccagtcaagatttcataaaatatattaaagttatccagtagatctccaagttgattcctgacatcactctcaagtcccctaatacacacatcacactctcaaacttacaaatttggtttgccaaaatgtccagtgggaagggtttaattcagcagataatagaaccttgccctgtcctacctaggatctttgctgccattccttcgtttataggtgtgagtggggtaaaaagtagctcatccataaaggaggcagtgaaaatctctagtgaagagcactgagcctgggacataacctgtttcattttccacagcttctttacctcaagccacagaattgttcttagctctttaacttttgtcagcacccacatcaaatcaacaaacttgtttatttttcttctttccttactatctatcacccagaatagtggttctcaaacttgagcgtgcatcagaatcatctgaacacttgttaaaagatctgttgctggaccctctcccagggcttctgatttagtaggtccgtgatggggcttaagtgatactgaagcagctggttcagggaacacgctttgtgaaccatttctggaaagaattttacagtagattcccatttgatctctctgcaagcagtctctttcctagtaagttcatattccacacttctgccagagttagctgcccaaaagcaatgtaatatgcctcccctgtatcagagtttggttggctctctatttattatagtataaaatccaaatcaggctgggtgtggtggctcacacctgtaatcccagcaatttgggaagctgagatgggtggatcgcttgaactcaggagtttgttaccagcctgggaaacatggggaaaccccatctctaccaagaatacaaaaaattagtcaggcatggtggcacacacctgtggtccgagctactcaggaggctgaggtgggaggattgcttgagcctggaaggcagaggttgcagtgagctgagatcacaccactgttctccaacctgggtgatagaatgagaccccgtctcaaaaaaagtccatatcacatcatacaagatccttgacgatatgtccccattttgtctttcccgctgtgtccccaactcagctgacctttgactatattgcaaaataagctttgtcctgtcaacagcatggctttttttcctgcttataatgtctatctctgcaaaatgttattcattcaacacccagctcatgtcaccttctccaagatgcatttctaaatgtcccccaattgaggtgttatgttatttttaaagtgcatacgtggctttctctcctaaagctataaaaccctcaaggacaaacactgtgttttatccatctttgactcctttggtgcacccaaagcccagtacctagacattcaatagctgttggttgatggaatgaatccaggtacttctgacagattccagattttcactttcttttgtttcttataataaaaatgtagtatagaagcagtcatggcatgagtctagtaaactgaggattcagatcagtcaaagttataatttatcttattccctttcctaaagcagctagagataatgaaaataaaacctttaaaaagaatgtaacacctttaagttgactgcctcgtgtacactgtggcagcatatatctggtaatcattggtataggaggtaagtttaacaggccagtttaagacagcatataaatcatcactaaaggacagatagctaagaaagatggaaaataaacaaataattgaaaaaccagattgacccagaaatgactaagaacaaagtttgtgcagggagacagggagaattgagtttagtactgttagttgctgtaaaatatatcaggtttgctttaattacatggtaatgcttctaagaacaaaggtaattacatgataacttatgttactactcccatattatctctaaataactatgtaattagcttgtcactactatacagtgtgaagtttgatattactcatggataaagaacattggtaacttaagtgagtgagcaagggtggggtgagggatggaggcagcagggaaatcatagaattattacaatcaggaatgcaaatggttaattagatcattgcacccagtccttaaggatctgagccagagccatggagaataccaaacgagtctgaggtaaattctccatggcttgtcacagtgtcttctgaagaccataaacatacaacaaagtaagttgacaaagcacgcaacagatcaatgagtttgggatataatgcatgtaattttaaacagttccttttatttggggaggtttttcttttaagtaaatactaagaattttttttaattgaaaaatatttcactcatctcattttccaacatcctgaggttatatgtgtggcctatggggtgaggatgtgtagcactgggaactctcatttattgctggtaaaaaatgcaaaatggtaaacaaccactttggaagacaatttggcaatctcttacaaaactaaacatacttttaccatatgatctagcgatcaggctccttcgttgcccaaatgatttaaaaacttacgtcttcacaaaaacctgcatgcatatgtttatagcagttttattcataattgacaaaacttggaagtagctacatatctttcactaggtgaatggataaacattatcgatacaataaaatatgattcagccaacaaaaagtaatgagctatcagctgggcatggtggctcacacccgtaatcccagcattttgagaggcaaaggcgggcagatcacttgaggccaggagttcaagaccagcctggccaacatggtgaaaccctgtctctactaaaaatacaaaaattagctgggcatggtggcaggcgcctataatcccagctacttgggagactgaggcaggagaattgcttaaacccaggaggcgaaggttgcagtgagctgagatcgtgccattgctctccagcctgggcaacaagagcaaaactctgtctcaaaaataaaaaaaagaaagaaggaaagaaatgagctattaagccaagaaaagacatgagggaaccttaaatgcatgttgctaaatgaaagaaggcagtcttaaaggctacatactgtgtgattctaactacagtcatgcaccacataacattttggtcattgacagaccacatatatggcagtggtctcataagattataaaaccttatttttactgtaccttttctatgtttagatatgtatagatacataggtacttaacattttgttacaattacctaaaattcaatagaataacaggctatacaggattgtagcctgggaacaataggctataccatctaggtttctgtaagtacactctgatgttttcacaatgacacaatcacctagtgatccatttctcagaatatatccccgttgttaagcaactcaagactgtatatcacattctagaaaaggcaaaactatggagactgtaaaaaagtcagtagctaccatgggctggagctgtggcgcaaggagagagggatgaataggtagagagcactgaggatttttagagcagcaaaactgttttgtgtgatactttaatggtgtatattattatatttgtcaaatcccacagaatatacaacacaaagtgtaagccctaatgtaaactatagatattatttaatgataatatgtcaataatggctcatcgattgtaacaaatacacccactaactaatgtaacaggttaatcataggtggaactggggagtaaggggatgagggaagatttgggaactctctgtattttctgcttcattgttttgtaaacctaaaactgcccaaaaatataaagtctaatttttttaaacccaagtgggaaaacctttcttcgatccatcttattctactgacatcttgggtgtgtatgatggtctgtgtttcccagtgtcatcaatttcactgccttaaggtgctatggcttagacttgtgtcctgtggccagtgacctcacagtttttaccaaaatacttgttttcattgctatcacgtgatagctactctaagtatgattatccttcttaattctgttaggaatccccccggcattccctgtgagggaagtattagtccttgaatttccgtttcaaaagatgcgtactgatttacttggtatatagcttctgtaagaggaagtttcatttgggaaagaaaggttgtgctaaggttccctcagaaactttctaaattgccttctctaaaattgcctgtgtttccctaagcctaagagtaaaatacaggaaatagtgatgatttttatgtgcttgaggaatcttctaagaagagtgaccaattttattctacttatactgatacttgtactgatttaccttgtggaaaattcatccagtggctacaattactaactcactccaaaggcatgagtgggaaactattaaaataacacatcacttagctgaaactcttgaatggttgctcttaataaccatttttctgaataatttaaagttcccatgttttttaaaaaggtttattgacttagatctgatttgaaaagtgtaatgtagcttattatagaatatttaaaacataagaaaaacaaacaggaaaaaagtcatcccaactctagaaacttaacttttttcaaacacattttttttttttttttttttttttactattttgactaaacatgtttctaaatgtacttcttggatctgactaaagactaaaaatggaaggaaacacaagtagaaattataaagtcaggatcaggccagtgtggtagctcatgcctgtaatctgaaaaccttgggaggctgaggtgggaggatcacttgaggccagaagttggagaccagcctgggcaacctagtgaggccccatctctaccccaaaaaaaaaagaaaaagaaacttatttatttaatttcctctctttaaaggtatcatatgcaaaacagaaggtttgggggttttggggttttttgtttgtttgttttttgagacagggtctccctctgtagtccaggctagagtacagtggcacaatcatagctcactgcagcctcaaactcctgggctcaagcagtccccactaccttagcctcccgagtagctaggactaaaggtttacaccaccatgcccagctaatttttctattttttgtagatacagggtcttgctgtgttgccagggttggtctcaaactcctgggctcaagcaattctcctgcctcaacctcacaaagtgctgggattacaggcatgagctgctgtgcccagccagaagttttcattttagcacagtttaatctttcactttctggtttctgctttttgtgtgtcttatttaagaaatattttctacctctaggacataaagatattttttattttcttctaaaagtcttactatttttccatttacatttaactcattgatagacctggaattctttttttttttaatatagagtgaggtaatgttatttttccaaattgaaaactagttgcctaaacactacttttctaagaagccatcttttccccatgaatttgcaatggcaactctgttgtagctcaagtttccaccttttctctatttatttatagctatgccaacaaacactgcatttattattatagatttttagaagtatttaatctggtaagactagtctctcctatcatttttacttcagtaagtgtatatgcctgttcttgatcctttgctttttcatataaattttagaatcaacttatcaggttcccaaaaacattgttgagactgtgattgaatttgtattgaatgttatcttcttctccaataacccagcatatctctccatttaggtcctttgtaatatctttccataaagttctatagttttctttattagaggctggcataacttgcatcgcttttgtatttttaccaaattacatttttaaaactgttgctcttgtatatatatatgtgtgtgtgtgtgtgtgtgtgtgtatgtgtgtatgtgtgtatatatgtatatgtatatatgtatgtatattctatatacaaagctgctctcaatgaaaatattgacaaatttatttcttcttttacaattcctgtgtatgtgtggggtgtgtgtgtgtgtgtgtgtgtgtgtgtgtgtgtgtgtgaagatctcgcactgttgcccaggatagaatgagtacagtggcatgttcacagctcactacagcctcatccttctgggctcaagcaatcctcccacctcagcctcccaagtagctgggactacagtcatgtgccaccatgcccagataatttctgtattttttgtagagccgaggtttcaatttcttacccaggctggtcttgaactcttgggcttaagcgacctgcccaccttagcctcccaaagtgctggaattacaggcacaaactactgcacccagcctccctttacaattcttaaattttttttagtcttgttactcttgttagggcttccccactatgttaaatagtattgattttttattttattttattttttgatacagagtcttactctgttacccaggctggaatacagtggcacaatctcagctcaacacaacctccacctcccggattcaagcaattctcatcccttagccaaccgaatagctaggattgcaggcacacaccaccacacctggctaatttttgtatttttagtagagatggggtttcaccatgttggccaggctggtctcgaactcctgacctcaagtgatccaccagcctcggcctcccaaagtgctgggattacaggtgcaagccattacgcctggcctgattattattattttatttttattttttatttatttatttttgtttttgtttttgtttttttttgaaacgaactcgttctgtcacccaggctggagttcagtggcccgatctcggctcactgcaagctccacctcccgagttcatgccattctcctgcctcagcctcccgagtagctgggactacaggcacccgccaccacccccagctaatttttttttttgtatttttagtagagacaggttttcaccatgttagccaggatggtctcgatctcctgaccttgtgatctgcccgcctcggcctcccaaagcactgggattacaggcatgagtcaccatgcccagccctcattattatttttaatgggactgtgtatgttttctatttatttgtaattttactgtttccctttttccacattttctgcagttattgggtatgacttttataatcagaaaaacaatattttcacttgctttcttaaaaataaataatctcttagtgaaggcctgaggggtccttataggtgtaatatggatggccatggagctgctatggcttcaggctttatatatatgaggtattgctgtctattcacagtattctctgacctttaaatttatgtggcttaaaatctattttcaatgcataaacatttgtatatttttccaggtgaacaatgtactacctagatgtataataatttaaatttagtgtaaaatgagattttttacaacaaattatatatttccaaaaactttaaaatgtttaaactctacataggcatatggtggtctactatatataaaaggtttctgggaactatttaagaagataaaaatagagccactgacatgtatttgtactgtatctttgggaaaacaatttcagcgtaatatatacttgtaaaaagtgaattagtaaaactattctggccgggcacagtggctcacacctgtaatcccagcactttgggaggctgaagtagaaggattgcttgagcccaggggttcagaccagctgggccacatggtgagactccatttctacaaaaaatagaaaagttagtcaggcatagtggcacacacctgtagttctagctactcaggaggctgaagtgggaggattgcttgagcccaggagtacaaacaaaaacaaaaaaaactttattcctccaagtttaaaaagtgcagcttgcttacttgttgacaagctgctgaatatagaatgaacagtaatagagtctactgggttttaggttccagctaccatgaaaaactattaaggaactataaatagaaaagaaaaaatggactcataaagactttgttcatttccttctaaaatatccctagcttattaagtgtctccattaaggcttccgtacccactgacaatatttcttgattctctgtaaatgacactaagaaaattctagatgctatagctcttctatagtaactacatggaatagacagcttaagttaggaaattacattgccttttgagcacaccagcaatcctacctctgtgtgctttgaggaaactagtgtagcacctcctctttttgtacaactttaacatatgtttcaggtctcatgtcaaataccagatacaatttgtcaatttattgatcacattttgtaacatcagtaaaagtctaaataaaatcaaccagaagataataggctacaccaattgttaatgaacagaggtttatttggaaagattgttccaggattcagagccagctaacaatagctctaggaacccaatttattgtcgatgagagattctcaccttatgcctcgtcagctagaggacctaaagtctataacgtctcctaaagctgggaaaagcctgagaggcccaggttgatacgcctatgtgtaacaggatagagagaaggaaccaaagtaaaaaggcaacaacaactgcctcagcatatgagttcttgatttggaaaaacctgcactgatggttcttgttctctggtgtaatgcctcctatgcctgctctcttggctgtgttgaaaagcatacatacagagctgtgctcttcattttcaagatgatgtactgataaggaccacaagccagtggcactgggaaaaagggatcctaagagactttttcttattaaacatacattcaaagtcagttatttaatattttgctttttggactcttggtaagcccaaatcttgttctaaaaagagcagacttttttgttttgttttgttttgtttgagatagtgtctcactctctctcccattctggagtgcagtggagcgatatggctcactgcagccacaacctcccaggcttgggtgatcctcccacctcagcctcctgagtaagtagctgagactacatgtatgtaccaccacgcctggctaaatttttgaatttttttgtagggacggaattttgccatgttgcccaggctggtctcaaacttctgggctcaaatgatctgggtgcctcagcctccctaagtactgggattacaggcatgagccaccaggcctgacttgtttttgtttttttgttgttgttgttgcccaaactagagtacagtaggctcaatcacagctcactgcagcctcaacctcccacctcaagcagtccttccacctcagcctcccaagtagctgggattgcaggtgcatgccaccacgcccagctaattttttttttttttttatgtagagacgagtctccctgtgttgcccaggctggtttcctgggctcaaatgattctcccatctcagcctcccaaagtgctcagattagaggtgaggcatgagccacccaacctagccttttttttttttttttttttaatacctgcaagccacatttatctgctatagtgtttaccaaccacactctggggcctgaggctgtgtttcagtgaatgaaatattaaaaagtactttgtttacttgctgacacagtacagtatttgtatctattaatagcatattgttattgttggttttttttttcgaaaaacactttattggaataatatacttaaaatgcagggaacttttaaaaatagagtgaggccaggcatggtggctcacacctataatcccagcactttgggaggccgaggcaggcggatcacctgcagtcaggagttcaagaccagcctggccaacatggtgaaacccgtctctactgaaaatacaaaaactagctgggtatagtggtgcatacctgtaatctcagctactcaggaggctgaagcaggagaatcacttgaacgctggaggcggaggttgcagtgagccaagatcacaccagtactccagcctggatgacagaggagactctcaaaaacgataataataattataaaatagagggtgaaagaccaaacatcctatagaaaaataagcaaaagataaaaattaattcacagagagatttgttctttaaagatatataaaaagatgttcagcttcacttaataagagaaatccagattaaaattatactgaaatatttctaacccatcggactggcaaaaattcaaaagctggacagtgtactatattggtgaagttgtggggaaatgggcactcttacattactagtagaaatagaaaatccttaaacctctatgaaggagaatcactaataaaactatgtatgcatatagttactcattaacctagcagttctacttctagaatttatcctgaagatacgcccctaataacacaaaaatacatatgtaaaattttattcattgtagcattgtttatatttccaaaacattggaaactatgtaaatgcccacacataggagatagattaaactacagtgtatttatacatggagatactatgtagctgtaaaaaagaatgaagaaaatctctaccaattgatgtataatgattaccaggagattttggtctctgactacaggagtctcgctctgtcacccaggttggagtgcagtggcgtgatctcggctcactgcaacctctgcctcctgggttcaagcgattcttctgcctcagcctcccaagtggctgggattacaggcacccgccaccacacccggctaatttttgtatttttagtagagacaggatttcaccacgttggccaggcaggtctcaaactcccgacctcaggtgatccacccgcctcagcctcccaaagtgctgggattacaggcgtgagccatggcacccagcctccaagagatacttttaagtggaaaaaaagcaaagtgtaagagagcatatatagtgtattacctccttttgtgttaaaacaaaaaaaaaaagaaaagaaaaagaaagaaaaggaagaaaatgtacatacatctgcttacctttactaaaagaatacaggaagataaaccagaaaacagtgaaagtggttgcttaaagggatggtgaggaggacatggtaaagagagtcactcttctttgagcatatcttttatagaatttttacttttagaaacatgttaatgttctacatattttttaaatattaaatcaataaggatagaatgtaagaaatgggactaaaactgaaagcaaactgaaaaacatgaacccaactatttccaatcttttcttaagtaaaatgagctccccaaagggggtaaaaaagagaaccaatctaagttacatgctgaacacagtatttgactacaccagagaacagaaaattaaccctaaactctttttagtagatttggatttttttcttttaaagttagggatgaagtgacttggaaactattttagatgtattacaaaagtgagtaaacaaataaatttgttgatatttttgggagctaggttctcactataaaagaaggaacatacaaataatgggatgaggaaaggcaagaaagaaccctgtggagatggactagaattggaagtactggtgtcagctcaatttctaaaataggtctctgtacacatgtatacgtatacagttatggatgtaagtgtgtgtgtgtgcatgactatgtatacatgcatacttcccagctctgttcattaacatggtctagaagcaaagagcacagctgccacccagatcttggtctctaataccattctgtgctaaaaagaaccagttatcctcagataaatggctgattccagggcatagtagagcccagaacattatgccagaacataaagaagggatcaaaaataatgtgatggcatatccaatgacacgggagccaccagcctgaacggctcccactggcaaaaactggaatattttaaggaccaaattaattaagggctgtaagggattataaaccattgatttaaaaagaattgtgggccaagcatggtgtctcacacctgtaatcccagcactttgggaggctgaggtgggcggatcaccttaggttgggagtctgagaccagcccgtccaacatggtgaaaccctatctctactcaaaatacaaaaattagccaggcatggtggctcatgtagtcccagctgctacttgggagactgaggcaggagagtcacttgaactggggaggtggaggttgcagtgagctgagatcgtaccactgcactccagcctcggtgacagagcaagactccaccacacaaataaaataaaaataattgtgcattcttattgataataaatagattttaaaataataaatgggagaagaggtaggctcttgtttatggtagaatggtgagggctgactggtaaatgtgaaaatcatttcacagctgcagttggaaaatcatcacagtatgagttgcttcagttaaaaattatgagtggatactcaatctgggagggggttgggacttttgataaagaacagaatatttatgtgatttttttttttttttgagatggagtctctgtcgcctcggctggagtgcagtggcgtgatctcagctcactgcaacctctgcatcccggattcaagcgattctcctgcctcagtttcccaagtagctgggactacaggcacccgccaccatgcccagctaatttttgtatttttagtagagacagggtttcatcatattgaccaggctggtcttgaactcctgaccttgtgatccgcccccctcggcctcccaaagtgctgagattacaggcaggagccaccatggccagcctaatttgatttgaggatttgctcagtctgtcttccttccttctttccttccttccttccttccttccttccttccttccttccttccttcctctctctctctctggtctctttctttcttttttctttttttttgagatggagttttactcttgttgcccaggctggagtgcagtgacatgatctcggctcactgtgacctctgcctcctgagttcaagcagttctcctgcctcagcctcccaagtagctgggattacaagcaagtgccataacacctggcaaatttttgtatttttagtagagacgaggtttcaccatgttggccaggctggtctcaaactcctgacctcatgatctgcctgcctcggactcccaaagtgttgggattacacgtgtgagccaccgtgcctggcctatgtgatcttaaattgtctattcacaaactgcttgttagatgcaagggaaaaaataggtactatacaatggagaagtaggacaacaccttgatcaggtggtcagaattcctatcaccagtgcacagcagatggacatgatgtgcctctaaatgtgacactttgagaaggatccatcataatgtgtgtagtagtctgcctgggtgtgcatagtctgaacttaatcatgagaaaatattagacaaatccaaaattagaatcagtctattaaaaatgggaaaataaataagtaatgggataagcgcgtcagacacagtggctcacacctgtaatcccagcactttaggaggctgaggcgggtggattgcttgagtccaggagttcgagaccagcctgggcaacatgacaaaaccccatctactaaaagtacaaaaaaattagccaggcgttgtggtgtgcacctgtggtcccagctacccgggaggcagaggtaggagaatcacctgagcctagggagttgaggctgcagtgagccaaaaaaaattatgccactgcactccagcctgggcaatcagagtaagaccctgtctcaaataaataacaaataaattaaaaatgaggtgaggtaagttatgactatattcttcaaaaatgtccgtatctcaaaagtcaaaatctgaggaaatgttccagatttttaaaaactataaagataccacagttaaatcctgaactagactctgttccagaggagaaaatttccataaaggatattattgggtaattgactaaattgaaatatggacagtagattagataacagtgttactgaagttgatgttgatgtccacactgtagctatgtaagagaatatccttattctcagaaaagatacactgaagttttcagaagtaaaaagacattgtaaatgtaacttcctctcaaatagttcagggaaataaaattgtatgcagagaaagagtacatgcaaatggtgcaaaatgttaacaatattgtgcacctgggtagatgatatgcagatgctttttgtactatttttattcctgcaacttttttctgaatttggaatccttttcaaataaaatacattttaagcaggctaataattaaaaatctaaactaagattatattgggaaacattatgctaagtgaaataagctagacacaaaaagacaaatattgtatgatctcacttatatgaggtacctagaataggcaaatttatagagacaaaagtagagtagcagttaccaggggctagaagtaaagaggagtggggagttattgtttaatgggtacagagtttcttttggggtgatgaaaaacttctaaaaatgcatagaggtagtagttgcacattgtgaatgtacttaatgtcactgaattgtgcatttaaaatttgttaaaatagtaaattttatgttacgtatatttttcaaaataaaaaagtatcttggggatgtttacttccattataaaaggattccctacaattatttaaatataagctccctttgtttatttaaacaattttatacagctttcaagattcacatcagatactttttgaagattccacttataactgattatgtagtatctgtatttcattttagttggtttttaaaaatagattattgaaaaactgacattcaccttgggcaaaggtcttagcttttttcagcatccaggttctccacttgtcaaagcaaaagattcttcagaatacttcattcatcatctagttctcttagaaaaaggatgctggtggttttgcttcacaaaaatatttcataaacatgagctttttctttttctcacaatgatcataccaggcggaatgaagaaaacagatgttgcttataaggcgtctaatagacatgtttgcattgtaagctgatctgactctgaatttggcatctgctccattcactgtgtggactgagcattttcgcctcacagtttggcagaaaagttaatattgacttttgactgttacctgaaaacttggtgataaaatactcttactaaacctcttgagagagtgattttacagtctcagcaaatgtctttaaaatacatcattctattaaccattttaattttattctttggttgggaatacttatttgtttcatctaatacagagcattccccaaatctgactgggaaaagtctgtgtggtcagaatggtagaagaaggaggacataaatcacttataatgttctctacaggtcattataccacagcttctcaattaaccttcatccccctcaggctgcccagggcctcagggaaggcccagaagcctagctgcagcacagtttctcattattatctgctcttctgagtatttgagtgttaactgcagcagctcagcagctcaggtttcccctaaggggaaggtagcccagattcttctgctcttgacctgtcttatttgcaattatcctttttttcttttttcacagttttattgtggcataatagacatacaataaacggtatgaatctaaagtttacaattgtataactttggacatatgtgtacacccatgaaaccatcactatggacatatccactgctcccatggccttttctaatcatgccttcctgctccttctcatccccttttggattgtttccagtttggggctattacaaataaagctgctgtgaacattcatttacaagtctttgtgtggatatgtgctttcacctaccttgggtaaatacctagaaatagaacggatcatatgatatgcacatgtttagctttttaagactgacagatggtttgggaaagtggtcttagcattttacattcccacaattagtgtgtgagagttccagttgatcacacccttgccaacacttgttatagtcagtcttttcagttttagccattctgcgagtgtgcagtggtatctaattgtgattttaatttgcatttctttaatgaataatgatattgaacattttttcatttgcttatttggcatctatcttctttgctaaaatgttaaatacttttgcctactttgtgttgagttgtttcttgttattgaggtaccaagtatttaattgtgacaaagttcagattattttttcttctataaaagttgcattcttagccaagtgtggtaacttatacatgtaatcccagtgctttgggaggccaaggcgggcagattacttgagcccaagagttcaagaccaacctgagcatctctacaaaaaaatgcaagaattagaggaaagctgaggtgggagaagagcttcagcccagaaggtcgaggctgcagtgagccatgagtgtgccactgcactccagcctgggtgatagtgagacactgtctcaaaaataaataaatttttaaaaaagaaaagttcatactttttacctcttactaagtgatctttagcaaacccaagatcactaagattttcttctatgttttctcctcaagagttttaggattttattccttacatttatgtctgtgattcatttcaagtgaatttttgtagatagtgtaaggtaaaggttgaaatgcttttttttcacacaatttgttaaagtgtcctttcttgatgggattgtttgggcacctgtgtcaaaaatcagttggctatacagaagtaggtttatttctggactctgttcagttccattgatctatttgtctatatgctaataccatagtgtcttggttattatcattctataataaattttgaaatcaggtagtataaatcctctggctttgttcttctttttcaaagttgagtttttgctaacctaggtcctttgaatttccatataaattttagaagcagcttgtcagtttctataagaaaaatctgctagaatttttattagtattccaatgaattaatagaaaaattcctgcagaactgataatattgaatcttctgacctttgaacactttatgtctatttatttaggcttcttttatatttctcagcattgttttgtcattttcaatgtgcaggccctacacaacttctgtcagatttattctaaggtacttcaaatatttgaagtatgtgaagtaccttagaataaatatggataaatattcttaactttttaatcaatttttgtttttgagacagggtcctactctgttacccaggttggggtgcagtgatatgatcatagctaaccacagccgcaaccttccaggcttaagcaatcctctcacctcagcctcctgagtagctaggtctacaggcatgcaccaacatgcatggctaatttttgtattttttgtagagacaggatttcgccatgttgctcatgctggtctcaaactcctgagctcaagcaattcacccatcttggcctctcagagtgctgggattataggcatgagccacgatgcctggcttattcttagtaacttctaattgttcattgctcgtatgtataattatatatacacattaccagtatagataatttacttttgtatttttagtagagacggtgtttcaccatgttgattttgagaccctatcaacatatgcttccctggctgggtgtggtggctcacgcctgtaatcccagcactttgggaggccaaggcaggcggatcacctgaggtcaggagtttgagaacagcctggccaacatggtgaaaccccatctctactaaaaatacaaaaattagctgggcgtgatggaaggcacctgtaatcccagctactcgggagcctgaggcagaagaatggcttgaacctgggaggcagagattgcagtgggccaggatcatgccattgcactccagcctgggcaacaagagtggaactccacctcaaaaaaaaaaaaaaaaaggaagaccagattgacttgatggcaagttgttgtgtctcaacttgagctctttagaataaatattaggggaagctcatgatgtttgggaaaagatctcccgaccgggcacagtggctcaacacctgtaatcccaggccaaggcaggcagatcacgaggtcaggagtttaagaccagcctggccagcatggtgaaaccccatctctactgaaactacaagaattagctaggcatggtggtgcatgcctgtagtcccagctattcaggaggctgaggcaggagaattgcttgaacctgggaggcggaggttgcagtggccaagatgatgccactgtactccagcctgcgtgacagggcaagactccatctcggggaaaaaaaaaaaaaaaaagacctccctaacggtaacgcacaagactttctcttactgtcaaggctgaagaatgagacaggtgcttagatcatatattggtctgacccaatatgacatttctgctgctgttatacaatactcatgtgtttttttttgcctgtgttctaggttttctgtctcaactggtctctgacaagcctctgactgaatgtatccgtgctggccactatgcagcaagcatcataattagacggactggctgcacctttcctgagaagccagacttccactgatggaagagctgaaaacacaagcccaggagtgcagacactgccctaattgcttcctgagaattcccatattaataaagaagaaaattatctgccattttttcctactataataatgctgaatcttaatttagagggtacaagggtatggtaatgcttgtagaatctttattatctcaacaatctaaaaaatgatgtttatttccatagtttgatagtgccacttaaatgccaattaaacaagaatataacatttcaatagaaatttttatttcattttcaattactttgtaaattcgtgtgtatttagtacactgatttgtttttttacatttctgctttgaatgcagatgcaatttaatataatagattttttaatgaattaatcttaacatagtaatctttagctttttatacaaatatatttaatttaggagtatatgtgtgtctatacacacacatacataaatataccacatatacacctgatagtcaaataaggtacagaaattttatcttgtcaattatgccaaataatctctttaatgtgcactcaaacatgtaataaactttggataattaaataatgtgccaaatttaagttgtaccacaatattcaaatcatagtcttatggaactctgtaattggacacaaacaaaaacttgtcatataggaatttttttctgtcttttccctgtgtacagcaaactgaggaagaaagatcattatttaatactgggccctgaaatgacacccaatttgttaatggaattatgaagaacagcaatataatacactgaagaataacttagtatcagagaccaataaatcacttttttaaggatgacaaaatggtataattggacttctggagtcagactttatatgaccttaggtaaatcttcgaacctcagtttcctttttgtaaaatgagataataacccttacatagaaggtcattgagatgatttgagcgagattaccaagtataagatatttgttataatgccttgtaaatgctttataagtagctgctgttattatcattatgattattttctttttgaagaaaaaaagataatgtttgtaaaactgaattcaaatcataggaaaggatttggccaggcgctgcagctcatgcttgtaatcccaacactttgggaggccaaggtgggaggatcacttgagcccaggagttcaagaccagcctgggtaacaaagtgaggccccacctctacaaaaaaatttttaaattatccagccacaggctgggcacagtggcttacacctgtaattccaccactttgggatgaggcaggtatcactagaggtcaagagttcaagaccagcctggccgccatgttggtgaaactccatctctattaaaaatacaaaaattagccaggcatggtggtggatacctgtaattccagctacttgggaggctgacacaggagaattgcttgaacccaggaggcggaggttgcagtgaggcaagatcacaccactgcactccaccc

SEQ ID NO: 2 - DNA, 20 bp, synthetic construct
  source 1..20: mol_type = other DNA
  misc_feature 1: note = LNA
  misc_feature 2: note = LNA
  misc_feature 14: note = LNA
  misc_feature 17: note = LNA
  misc_feature 19: note = LNA
  misc_feature 20: note = LNA
acacacaatttcacaacttg

SEQ ID NO: 3 - DNA, 20 bp, synthetic construct
  source 1..20: mol_type = other DNA
  misc_feature 2: note = LNA
  misc_feature 4: note = LNA
  misc_feature 17: note = LNA
  misc_feature 15: note = LNA
  misc_feature 19: note = LNA
  misc_feature 20: note = LNA
  misc_feature 1: note = LNA
gacacacaatttcacaactt

SEQ ID NO: 4 - DNA, 18 bp, synthetic construct
  source 1..18: mol_type = other DNA
  misc_feature 3: note = LNA
  misc_feature 15: note = LNA
  misc_feature 16: note = LNA
  misc_feature 1: note = 1
  misc_feature 2: note = LNA
  misc_feature 4: note = LNA
  misc_feature 17: note = LNA
  misc_feature 18: note = LNA
ctatatttagcaacaatt

SEQ ID NO: 5 - DNA, 20 bp, synthetic construct
  source 1..20: mol_type = other DNA
  misc_feature 12: note = LNA
  misc_feature 1: note = LNA
  misc_feature 2: note = LNA
  misc_feature 19: note = LNA
  misc_feature 15: note = LNA
  misc_feature 20: note = LNA
ttttatctttgacagttctg

SEQ ID NO: 6 - DNA, 19 bp, synthetic construct
  source 1..19: mol_type = other DNA
  misc_feature 1: note = LNA
  misc_feature 14: note = LNA
  misc_feature 3: note = LNA
  misc_feature 18: note = LNA
  misc_feature 19: note = LNA
  misc_feature 2: note = LNA
agttttatctttgacagtt

SEQ ID NO: 7 - DNA, 18 bp, synthetic construct
  source 1..18: mol_type = other DNA
  misc_feature 1: note = LNA
  misc_feature 3: note = LNA
  misc_feature 18: note = LNA
  misc_feature 2: note = LNA
  misc_feature 13: note = LNA
  misc_feature 17: note = LNA
agttttatctttgacagt

SEQ ID NO: 8 - DNA, 20 bp, synthetic construct
  source 1..20: mol_type = other DNA
  misc_feature 3: note = LNA
  misc_feature 5: note = LNA
  misc_feature 20: note = LNA
  misc_feature 1: note = LNA
  misc_feature 2: note = LNA
  misc_feature 15: note = LNA
  misc_feature 16: note = LNA
  misc_feature 19: note = LNA
ttatcaaggaaatctttgtc

SEQ ID NO: 9 - DNA, 20 bp, synthetic construct
  source 1..20: mol_type = other DNA
  misc_feature 2: note = LNA
  misc_feature 19: note = LNA
  misc_feature 3: note = LNA
  misc_feature 1: note = LNA
  misc_feature 5: note = LNA
  misc_feature 20: note = LNA
  misc_feature 15: note = LNA
tacttacttatcaaggaaat

SEQ ID NO: 10 - DNA, 20 bp, synthetic construct
  source 1..20: mol_type = other DNA
  misc_feature 4: note = LNA
  misc_feature 18: note = LNA
  misc_feature 7: note = LNA
  misc_feature 1: note = LNA
  misc_feature 2: note = LNA
  misc_feature 19: note = LNA
  misc_feature 20: note = LNA
ttaatacttacttatcaagg

SEQ ID NO: 11 - DNA, 16 bp, synthetic construct
  source 1..16: mol_type = other DNA
  misc_feature 14: note = LNA
  misc_feature 15: note = LNA
  misc_feature 2: note = LNA
  misc_feature 4: note = LNA
  misc_feature 16: note = LNA
  misc_feature 1: note = LNA
gtttcagagaatacct

SEQ ID NO: 12 - DNA, 20 bp, synthetic construct
  source 1..20: mol_type = other DNA
  misc_feature 16: note = LNA
  misc_feature 1..4: note = LNA
  misc_feature 19..20: note = LNA
tttgattacttctaaatctg

SEQ ID NO: 13 - DNA, 18 bp, synthetic construct
  source 1..18: mol_type = other DNA
  misc_feature 1..3: note = LNA
  misc_feature 5..6: note = LNA
  misc_feature 16..18: note = LNA
catatcaatggaaagttc

SEQ ID NO: 14 - DNA, 20 bp, synthetic construct
  source 1..20: mol_type = other DNA
  misc_feature 1..3: note = LNA
  misc_feature 9: note = LNA
  misc_feature 19..20: note = LNA
atgtgaaatcttaaacatcc

SEQ ID NO: 15 - DNA, 20 bp, synthetic construct
  source 1..20: mol_type = other DNA
  misc_feature 1..4: note = LNA
  misc_feature 16: note = LNA
  misc_feature 14: note = LNA
  misc_feature 19..20: note = LNA
ttaatttacaacttcatctg

SEQ ID NO: 16 - DNA, 20 bp, synthetic construct
  source 1..20: mol_type = other DNA
  misc_feature 1..3: note = LNA
  misc_feature 19..20: note = LNA
  misc_feature 5: note = LNA
  misc_feature 8..9: note = LNA
aaagctttgaaatcttttac

SEQ ID NO: 17 - DNA, 20 bp, synthetic construct
  source 1..20: mol_type = other DNA
  misc_feature 1..2: note = LNA
  misc_feature 7..9: note = LNA
  misc_feature 19..20: note = LNA
tcaaagctttgaaatctttt

SEQ ID NO: 18 - DNA, 20 bp, synthetic construct
  source 1..20: mol_type = other DNA
  misc_feature 5: note = LNA
  misc_feature 17: note = LNA
  misc_feature 19..20: note = LNA
  misc_feature 1..2: note = LNA
tttcacaagttcatcaaacc

SEQ ID NO: 19 - DNA, 20 bp, synthetic construct
  source 1..20: mol_type = other DNA
  misc_feature 5..6: note = LNA
  misc_feature 1..2: note = LNA
  misc_feature 8..9: note = LNA
  misc_feature 19..20: note = LNA
tttgaattttttcacaagtt

SEQ ID NO: 20 - DNA, 20 bp, synthetic construct
  source 1..20: mol_type = other DNA
  misc_feature 1..2: note = LNA
  misc_feature 8: note = LNA
  misc_feature 18..19: note = LNA
  misc_feature 4: note = LNA
  misc_feature 6: note = LNA
  misc_feature 20: note = LNA
actttgaattttttcacaag

SEQ ID NO: 21 - DNA, 17 bp, synthetic construct
  source 1..17: mol_type = other DNA
  misc_feature 16: note = LNA
  misc_feature 1..2: note = LNA
  misc_feature 4: note = LNA
  misc_feature 14..15: note = LNA
  misc_feature 17: note = LNA
ttttaatgtgacatgct

SEQ ID NO: 22 - DNA, 19 bp, synthetic construct
  source 1..19: mol_type = other DNA
  misc_feature 13..14: note = LNA
  misc_feature 1..2: note = LNA
  misc_feature 16: note = LNA
  misc_feature 18..19: note = LNA
tgaaattcatgcatttgtt

SEQ ID NO: 23 - DNA, 17 bp, synthetic construct
  source 1..17: mol_type = other DNA
  misc_feature 1..2: note = LNA
  misc_feature 5..6: note = LNA
  misc_feature 16..17: note = LNA
tgttttaagtctacctg

SEQ ID NO: 24 - DNA, 18 bp, synthetic construct
  source 1..18: mol_type = other DNA
  misc_feature 1..3: note = LNA
  misc_feature 13: note = LNA
  misc_feature 17..18: note = LNA
cacatatggctgatcatt

SEQ ID NO: 25 - DNA, 20 bp, synthetic construct
  source 1..20: mol_type = other DNA
  misc_feature 4..5: note = LNA
  misc_feature 16: note = LNA
  misc_feature 19..20: note = LNA
  misc_feature 1..2: note = LNA
tgaaacatctggtcaatatc

SEQ ID NO: 26 - DNA, 19 bp, synthetic construct
  source 1..19: mol_type = other DNA
  misc_feature 1..2: note = LNA
  misc_feature 18..19: note = LNA
  misc_feature 16: note = LNA
  misc_feature 12: note = LNA
attgaaacatctggtcaat

SEQ ID NO: 27 - DNA, 17 bp, synthetic construct
  source 1..17: mol_type = other DNA
  misc_feature 1..2: note = LNA
  misc_feature 13..14: note = LNA
  misc_feature 16..17: note = LNA
taatgagcatccacatg

SEQ ID NO: 28 - DNA, 19 bp, synthetic construct
  source 1..19: mol_type = other DNA
  misc_feature 1..2: note = LNA
  misc_feature 18..19: note = LNA
  misc_feature 13: note = LNA
tagtaatgagcatccacat

SEQ ID NO: 29 - DNA, 16 bp, synthetic construct
  source 1..16: mol_type = other DNA
  misc_feature 1..2: note = LNA
  misc_feature 5: note = LNA
  misc_feature 15..16: note = LNA
cagcacaagttcctgt

SEQ ID NO: 30 - DNA, 16 bp, synthetic construct
  source 1..16: mol_type = other DNA
  misc_feature 1..3: note = LNA
  misc_feature 15..16: note = LNA
tctttcctacttaagg

SEQ ID NO: 31 - DNA, 20 bp, synthetic construct
  source 1..20: mol_type = other DNA
  misc_feature 1..2: note = LNA
  misc_feature 14: note = LNA
  misc_feature 19..20: note = LNA
tataacaccaaccacttttt

SEQ ID NO: 32 - DNA, 20 bp, synthetic construct
  source 1..20: mol_type = other DNA
  misc_feature 1..2: note = LNA
  misc_feature 4: note = LNA
  misc_feature 14: note = LNA
  misc_feature 17..20: note = LNA
agaaaattgttctacaatag

SEQ ID NO: 33 - DNA, 20 bp, synthetic construct
  source 1..20: mol_type = other DNA
  misc_feature 1..2: note = LNA
  misc_feature 18..20: note = LNA
  misc_feature 12: note = LNA
  misc_feature 15..16: note = LNA
aaaatcagttctactttcat

SEQ ID NO: 34 - DNA, 20 bp, synthetic construct
  source 1..20: mol_type = other DNA
  misc_feature 1..4: note = LNA
  misc_feature 6..7: note = LNA
  misc_feature 9: note = LNA
  misc_feature 19..20: note = LNA
tcaacaaattcacatcaatg

SEQ ID NO: 35 - DNA, 20 bp, synthetic construct
  source 1..20: mol_type = other DNA
  misc_feature 1..3: note = LNA
  misc_feature 18..20: note = LNA
  misc_feature 16: note = LNA
  misc_feature 13..14: note = LNA
aaatagtaacctggtcaaat

SEQ ID NO: 36 - DNA, 17 bp, synthetic construct
  source 1..17: mol_type = other DNA
  misc_feature 1..2: note = LNA
  misc_feature 12: note = LNA
  misc_feature 14..17: note = LNA
atatcaacataaggcat

SEQ ID NO: 37 - DNA, 20 bp, synthetic construct
  source 1..20: mol_type = other DNA
  misc_feature 1..3: note = LNA
  misc_feature 19..20: note = LNA
  misc_feature 15..17: note = LNA
  misc_feature 13: note = LNA
aacatgtataagttgtcaat

SEQ ID NO: 38 - DNA, 20 bp, synthetic construct
  source 1..20: mol_type = other DNA
  misc_feature 1..2: note = LNA
  misc_feature 7..8: note = LNA
  misc_feature 19..20: note = LNA
attgctatggtaactacatt

SEQ ID NO: 39 - DNA, 19 bp, synthetic construct
  source 1..19: mol_type = other DNA
  misc_feature 1..3: note = LNA
  misc_feature 13: note = LNA
  misc_feature 17..19: note = LNA
  misc_feature 15: note = LNA
actatattaaaaaggatcc

SEQ ID NO: 40 - DNA, 18 bp, synthetic construct
  source 1..18: mol_type = other DNA
  misc_feature 1..2: note = LNA
  misc_feature 4..5: note = LNA
  misc_feature 15..18: note = LNA
tataactttttggagatt

SEQ ID NO: 41 - DNA, 20 bp, synthetic construct
  source 1..20: mol_type = other DNA
  misc_feature 19..20: note = LNA
  misc_feature 1..2: note = LNA
  misc_feature 4: note = LNA
  misc_feature 9: note = LNA
tcacaaatctaatgaagcag

SEQ ID NO: 42 - DNA, 20 bp, synthetic construct
  source 1..20: mol_type = other DNA
  misc_feature 1..2: note = LNA
  misc_feature 4..6: note = LNA
  misc_feature 8: note = LNA
  misc_feature 18..20: note = LNA
tagaaaaaacctttaggatc

SEQ ID NO: 43 - DNA, 20 bp, synthetic construct
  source 1..20: mol_type = other DNA
  misc_feature 1..2: note = LNA
  misc_feature 4..5: note = LNA
  misc_feature 15..16: note = LNA
  misc_feature 19..20: note = LNA
atcagctagaaaaaaccttt

SEQ ID NO: 44 - DNA, 20 bp, synthetic construct
  source 1..20: mol_type = other DNA
  misc_feature 1..2: note = LNA
  misc_feature 15: note = LNA
  misc_feature 19..20: note = LNA
  misc_feature 5: note = LNA
ttatcagctagaaaaaacct

SEQ ID NO: 45 - DNA, 20 bp, synthetic construct
  source 1..20: mol_type = other DNA
  misc_feature 5..6: note = LNA
  misc_feature 1..2: note = LNA
  misc_feature 19..20: note = LNA
  misc_feature 8: note = LNA
tccaaaagaacttcattatc

SEQ ID NO: 46 - DNA, 20 bp, synthetic construct
  source 1..20: mol_type = other DNA
  misc_feature 1..2: note = LNA
  misc_feature 15: note = LNA
  misc_feature 18..20: note = LNA
  misc_feature 4: note = LNA
caagaggcttttcaaaattc

SEQ ID NO: 47 - DNA, 20 bp, synthetic construct
  source 1..20: mol_type = other DNA
  misc_feature 1..4: note = LNA
  misc_feature 16..17: note = LNA
  misc_feature 19..20: note = LNA
gaattgtcattttaaattct

SEQ ID NO: 48 - DNA, 20 bp, synthetic construct
  source 1..20: mol_type = other DNA
  misc_feature 4..5: note = LNA
  misc_feature 16: note = LNA
  misc_feature 1..2: note = LNA
  misc_feature 19..20: note = LNA
tttaatgtctttagtctatt

SEQ ID NO: 49 - DNA, 20 bp, synthetic construct
  source 1..20: mol_type = other DNA
  misc_feature 14: note = LNA
  misc_feature 19..20: note = LNA
  misc_feature 1..2: note = LNA
ctttaatgtctttagtctat

SEQ ID NO: 50 - DNA, 17 bp, synthetic construct
  source 1..17: mol_type = other DNA
  misc_feature 14..17: note = LNA
  misc_feature 1..2: note = LNA
  misc_feature 12: note = LNA
tctttaatgtctttagt

SEQ ID NO: 51 - DNA, 20 bp, synthetic construct
  source 1..20: mol_type = other DNA
  misc_feature 1..3: note = LNA
  misc_feature 5: note = LNA
  misc_feature 15: note = LNA
  misc_feature 17: note = LNA
  misc_feature 19..20: note = LNA
tattattgacatttatttgg

SEQ ID NO: 52 - DNA, 20 bp, synthetic construct
  source 1..20: mol_type = other DNA
  misc_feature 14..16: note = LNA
  misc_feature 1..3: note = LNA
  misc_feature 19..20: note = LNA
tttaattctcttttattatt

SEQ ID NO: 53 - DNA, 19 bp, synthetic construct
  source 1..19: mol_type = other DNA
  misc_feature 1..2: note = LNA
  misc_feature 15: note = LNA
  misc_feature 17..19: note = LNA
  misc_feature 12..13: note = LNA
aactgactcaattgatatg

SEQ ID NO: 54 - DNA, 20 bp, synthetic construct
  source 1..20: mol_type = other DNA
  misc_feature 4: note = LNA
  misc_feature 18..20: note = LNA
  misc_feature 1..2: note = LNA
  misc_feature 15: note = LNA
tgaactgactcaattgatat

SEQ ID NO: 55 - DNA, 20 bp, synthetic construct
  source 1..20: mol_type = other DNA
  misc_feature 1..4: note = LNA
  misc_feature 14..15: note = LNA
  misc_feature 18..20: note = LNA
aaaaagcagaaagtcttttt

SEQ ID NO: 56 - DNA, 20 bp, synthetic construct
  source 1..20: mol_type = other DNA
  misc_feature 1..2: note = LNA
  misc_feature 6: note = LNA
  misc_feature 16: note = LNA
  misc_feature 19..20: note = LNA
agctctgagttaatttaatt

SEQ ID NO: 57 - DNA, 18 bp, synthetic construct
  source 1..18: mol_type = other DNA
  misc_feature 1..2: note = LNA
  misc_feature 17..18: note = LNA
  misc_feature 5: note = LNA
  misc_feature 7: note = LNA
tacctccaacaaatgcat

SEQ ID NO: 58 - DNA, 16 bp, synthetic construct
  source 1..16: mol_type = other DNA
  misc_feature 1..2: note = LNA
  misc_feature 5: note = LNA
  misc_feature 15..16: note = LNA
tacctccaacaaatgc

SEQ ID NO: 59 - DNA, 20 bp, synthetic construct
  source 1..20: mol_type = other DNA
  misc_feature 1..2: note = LNA
  misc_feature 13: note = LNA
  misc_feature 16: note = LNA
  misc_feature 19..20: note = LNA
gctcaaagaactaacatctg

SEQ ID NO: 60 - DNA, 18 bp, synthetic construct
  source 1..18: mol_type = other DNA
  misc_feature 1..2: note = LNA
  misc_feature 7: note = LNA
  misc_feature 17..18: note = LNA
agtaaacacgtttacagc

SEQ ID NO: 61 - DNA, 20 bp, synthetic construct
  source 1..20: mol_type = other DNA
  misc_feature 1..3: note = LNA
  misc_feature 5: note = LNA
  misc_feature 15: note = LNA
  misc_feature 17: note = LNA
  misc_feature 19..20: note = LNA
aatactctgtttgagtaaac

SEQ ID NO: 62 - DNA, 20 bp, synthetic construct
  source 1..20: mol_type = other DNA
  misc_feature 1..4: note = LNA
  misc_feature 7: note = LNA
  misc_feature 17..20: note = LNA
taaaatcaatactctgtttg

SEQ ID NO: 63 - DNA, 20 bp, synthetic construct
  source 1..20: mol_type = other DNA
  misc_feature 1..4: note = LNA
  misc_feature 6: note = LNA
  misc_feature 8: note = LNA
  misc_feature 18..20: note = LNA
gtaaaatcaatactctgttt

SEQ ID NO: 64 - DNA, 19 bp, synthetic construct
  source 1..19: mol_type = other DNA
  misc_feature 1..2: note = LNA
  misc_feature 5..7: note = LNA
  misc_feature 18..19: note = LNA
aagttatcatgtaattacc

SEQ ID NO: 65 - DNA, 19 bp, synthetic construct
  source 1..19: mol_type = other DNA
  misc_feature 1..3: note = LNA
  misc_feature 13: note = LNA
  misc_feature 17..19: note = LNA
tctattatattaaattgca

SEQ ID NO: 66 - DNA, 20 bp, synthetic construct
  source 1..20: mol_type = other DNA
  misc_feature 1..3: note = LNA
  misc_feature 15..17: note = LNA
  misc_feature 19..20: note = LNA
aacatgtataagttgtcaat

SEQ ID NO: 67 - DNA, 20 bp, synthetic construct
  source 1..20: mol_type = other DNA
  misc_feature 1..2: note = LNA
  misc_feature 13: note = LNA
  misc_feature 15..17: note = LNA
  misc_feature 19..20: note = LNA
aacatgtataagttgtcaat

SEQ ID NO: 68 - DNA, 19 bp, synthetic construct
  source 1..19: mol_type = other DNA
  misc_feature 1..2: note = LNA
  misc_feature 12..15: note = LNA
  misc_feature 17..19: note = LNA
aactgactcaattgatatg

SEQ ID NO: 69 - DNA, 20 bp, synthetic construct
  source 1..20: mol_type = other DNA
  misc_feature 1..2: note = LNA
  misc_feature 4..6: note = LNA
  misc_feature 8: note = LNA
  misc_feature 18..20: note = LNA
actttgaattttttcacaag

SEQ ID NO: 70 - DNA, 20 bp, synthetic construct
  source 1..20: mol_type = other DNA
  misc_feature 1..2: note = LNA
  misc_feature 4: note = LNA
  misc_feature 6: note = LNA
  misc_feature 8: note = LNA
  misc_feature 17..20: note = LNA
actttgaattttttcacaag

SEQ ID NO: 71 - DNA, 18 bp, synthetic construct
  source 1..18: mol_type = other DNA
  misc_feature 1..3: note = LNA
  misc_feature 7: note = LNA
  misc_feature 17..18: note = LNA
agtaaacacgtttacagc

SEQ ID NO: 72 - DNA, 18 bp, synthetic construct
  source 1..18: mol_type = other DNA
  misc_feature 1..2: note = LNA
  misc_feature 7..8: note = LNA
  misc_feature 17..18: note = LNA
agtaaacacgtttacagc

SEQ ID NO: 73 - DNA, 18 bp, synthetic construct
  source 1..18: mol_type = other DNA
  misc_feature 1..4: note = LNA
  misc_feature 6: note = LNA
  misc_feature 15..18: note = LNA
ctatatttagcaacaatt

SEQ ID NO: 74 - DNA, 18 bp, synthetic construct
  source 1..18: mol_type = other DNA
  misc_feature 1..4: note = LNA
  misc_feature 13: note = LNA
  misc_feature 15..18: note = LNA
ctatatttagcaacaatt

SEQ ID NO: 75 - DNA, 20 bp, synthetic construct
  source 1..20: mol_type = other DNA
  misc_feature 1..2: note = LNA
  misc_feature 4..6: note = LNA
  misc_feature 8: note = LNA
  misc_feature 10: note = LNA
  misc_feature 18..20: note = LNA
tagaaaaaacctttaggatc

SEQ ID NO: 76 - DNA, 19 bp, synthetic construct
  source 1..19: mol_type = other DNA
  misc_feature 1..3: note = LNA
  misc_feature 13: note = LNA
  misc_feature 16..19: note = LNA
tctattatattaaattgca

SEQ ID NO: 77 - DNA, 17 bp, synthetic construct
  source 1..17: mol_type = other DNA
  misc_feature 1..3: note = LNA
  misc_feature 12: note = LNA
  misc_feature 14..17: note = LNA
tctttaatgtctttagt

SEQ ID NO: 78 - DNA, 17 bp, synthetic construct
  source 1..17: mol_type = other DNA
  misc_feature 1..2: note = LNA
  misc_feature 10: note = LNA
  misc_feature 12: note = LNA
  misc_feature 14..17: note = LNA
tctttaatgtctttagt

SEQ ID NO: 79 - DNA, 20 bp, synthetic construct
  source 1..20: mol_type = other DNA
  misc_feature 1..4: note = LNA
  misc_feature 16: note = LNA
  misc_feature 18..20: note = LNA
tttgattacttctaaatctg

SEQ ID NO: 80 - DNA, 17 bp, synthetic construct
  source 1..17: mol_type = other DNA
  misc_feature 1..4: note = LNA
  misc_feature 14..17: note = LNA
ttttaatgtgacatgct

SEQ ID NO: 81 - DNA, 18 bp, synthetic construct
  source 1..18: mol_type = other DNA
  misc_feature 1..2: note = LNA
  misc_feature 4: note = LNA
  misc_feature 6: note = LNA
  misc_feature 15: note = LNA
  misc_feature 17..18: note = LNA
aaacctagcaccttttag

SEQ ID NO: 82 - DNA, 18 bp, synthetic construct
  source 1..18: mol_type = other DNA
  misc_feature 1..2: note = LNA
  misc_feature 13: note = LNA
  misc_feature 15: note = LNA
  misc_feature 17..18: note = LNA
ttgctacactcaacagat

SEQ ID NO: 83 - DNA, 20 bp, synthetic construct
  source 1..20: mol_type = other DNA
acacacaatttcacaacttg

SEQ ID NO: 84 - DNA, 20 bp, synthetic construct
  source 1..20: mol_type = other DNA
gacacacaatttcacaactt

SEQ ID NO: 85 - DNA, 18 bp, synthetic construct
  source 1..18: mol_type = other DNA
ctatatttagcaacaatt

SEQ ID NO: 86 - DNA, 20 bp, synthetic construct
  source 1..20: mol_type = other DNA
ttttatctttgacagttctg

SEQ ID NO: 87 - DNA, 19 bp, synthetic construct
  source 1..19: mol_type = other DNA
agttttatctttgacagtt

SEQ ID NO: 88 - DNA, 18 bp, synthetic construct
  source 1..18: mol_type = other DNA
agttttatctttgacagt

SEQ ID NO: 89 - DNA, 20 bp, synthetic construct
  source 1..20: mol_type = other DNA
ttatcaaggaaatctttgtc

SEQ ID NO: 90 - DNA, 20 bp, synthetic construct
  source 1..20: mol_type = other DNA
tacttacttatcaaggaaat

SEQ ID NO: 91 - DNA, 20 bp, synthetic construct
  source 1..20: mol_type = other DNA
ttaatacttacttatcaagg

SEQ ID NO: 92 - DNA, 16 bp, synthetic construct
  source 1..16: mol_type = other DNA
gtttcagagaatacct

SEQ ID NO: 93 - DNA, 20 bp, synthetic construct
  source 1..20: mol_type = other DNA
tttgattacttctaaatctg

SEQ ID NO: 94 - DNA, 18 bp, synthetic construct
  source 1..18: mol_type = other DNA
catatcaatggaaagttc

SEQ ID NO: 95 - DNA, 20 bp, synthetic construct
  source 1..20: mol_type = other DNA
atgtgaaatcttaaacatcc

SEQ ID NO: 96 - DNA, 20 bp, synthetic construct
  source 1..20: mol_type = other DNA
ttaatttacaacttcatctg

SEQ ID NO: 97 - DNA, 20 bp, synthetic construct
  source 1..20: mol_type = other DNA
aaagctttgaaatcttttac

SEQ ID NO: 98 - DNA, 20 bp, synthetic construct
  source 1..20: mol_type = other DNA
tcaaagctttgaaatctttt

SEQ ID NO: 99 - DNA, 20 bp, synthetic construct
  source 1..20: mol_type = other DNA
tttcacaagttcatcaaacc

SEQ ID NO: 100 - DNA, 20 bp, synthetic construct
  source 1..20: mol_type = other DNA
tttgaattttttcacaagtt

SEQ ID NO: 101 - DNA, 20 bp, synthetic construct
  source 1..20: mol_type = other DNA
actttgaattttttcacaag

SEQ ID NO: 102 - DNA, 17 bp, synthetic construct
  source 1..17: mol_type = other DNA
ttttaatgtgacatgct

SEQ ID NO: 103 - DNA, 19 bp, synthetic construct
  source 1..19: mol_type = other DNA
tgaaattcatgcatttgtt

SEQ ID NO: 104 - DNA, 17 bp, synthetic construct
  source 1..17: mol_type = other DNA
tgttttaagtctacctg

SEQ ID NO: 105 - DNA, 18 bp, synthetic construct
  source 1..18: mol_type = other DNA
cacatatggctgatcatt

SEQ ID NO: 106 - DNA, 20 bp, synthetic construct
  source 1..20: mol_type = other DNA
tgaaacatctggtcaatatc

SEQ ID NO: 107 - DNA, 19 bp, synthetic construct
  source 1..19: mol_type = other DNA
attgaaacatctggtcaat

SEQ ID NO: 108 - DNA, 17 bp, synthetic construct
  source 1..17: mol_type = other DNA
taatgagcatccacatg

SEQ ID NO: 109 - DNA, 19 bp, synthetic construct
  source 1..19: mol_type = other DNA
tagtaatgagcatccacat

SEQ ID NO: 110 - DNA, 16 bp, synthetic construct
  source 1..16: mol_type = other DNA
cagcacaagttcctgt

SEQ ID NO: 111 - DNA, 16 bp, synthetic construct
  source 1..16: mol_type = other DNA
tctttcctacttaagg

SEQ ID NO: 112 - DNA, 20 bp, synthetic construct
  source 1..20: mol_type = other DNA
tataacaccaaccacttttt

SEQ ID NO: 113 - DNA, 20 bp, synthetic construct
  source 1..20: mol_type = other DNA
agaaaattgttctacaatag

SEQ ID NO: 114 - DNA, 20 bp, synthetic construct
  source 1..20: mol_type = other DNA
aaaatcagttctactttcat

SEQ ID NO: 115 - DNA, 20 bp, synthetic construct
  source 1..20: mol_type = other DNA
tcaacaaattcacatcaatg

SEQ ID NO: 116 - DNA, 20 bp, synthetic construct
  source 1..20: mol_type = other DNA
aaatagtaacctggtcaaat

SEQ ID NO: 117 - DNA, 17 bp, synthetic construct
  source 1..17: mol_type = other DNA
atatcaacataaggcat

SEQ ID NO: 118 - DNA, 20 bp, synthetic construct
  source 1..20: mol_type = other DNA
aacatgtataagttgtcaat

SEQ ID NO: 119 - DNA, 20 bp, synthetic construct
  source 1..20: mol_type = other DNA
attgctatggtaactacatt

SEQ ID NO: 120 - DNA, 19 bp, synthetic construct
  source 1..19: mol_type = other DNA
actatattaaaaaggatcc

SEQ ID NO: 121 - DNA, 18 bp, synthetic construct
  source 1..18: mol_type = other DNA
tataactttttggagatt

SEQ ID NO: 122 - DNA, 20 bp, synthetic construct
  source 1..20: mol_type = other DNA
tcacaaatctaatgaagcag

SEQ ID NO: 123 - DNA, 20 bp, synthetic construct
  source 1..20: mol_type = other DNA
tagaaaaaacctttaggatc

SEQ ID NO: 124 - DNA, 20 bp, synthetic construct
  source 1..20: mol_type = other DNA
atcagctagaaaaaaccttt

SEQ ID NO: 125 - DNA, 20 bp, synthetic construct
  source 1..20: mol_type = other DNA
ttatcagctagaaaaaacct

SEQ ID NO: 126 - DNA, 20 bp, synthetic construct
  source 1..20: mol_type = other DNA
tccaaaagaacttcattatc

SEQ ID NO: 127 - DNA, 20 bp, synthetic construct
  source 1..20: mol_type = other DNA
caagaggcttttcaaaattc

SEQ ID NO: 128 - DNA, 20 bp, synthetic construct
  source 1..20: mol_type = other DNA
gaattgtcattttaaattct

SEQ ID NO: 129 - DNA, 20 bp, synthetic construct
  source 1..20: mol_type = other DNA
tttaatgtctttagtctatt

SEQ ID NO: 130 - DNA, 20 bp, synthetic construct
  source 1..20: mol_type = other DNA
ctttaatgtctttagtctat

SEQ ID NO: 131 - DNA, 17 bp, synthetic construct
  source 1..17: mol_type = other DNA
tctttaatgtctttagt

SEQ ID NO: 132 - DNA, 20 bp, synthetic construct
  source 1..20: mol_type = other DNA
tattattgacatttatttgg

SEQ ID NO: 133 - DNA, 20 bp, synthetic construct
  source 1..20: mol_type = other DNA
tttaattctcttttattatt

SEQ ID NO: 134 - DNA, 19 bp, synthetic construct
  source 1..19: mol_type = other DNA
aactgactcaattgatatg

SEQ ID NO: 135 - DNA, 20 bp, synthetic construct
  source 1..20: mol_type = other DNA
tgaactgactcaattgatat

SEQ ID NO: 136 - DNA, 20 bp, synthetic construct
  source 1..20: mol_type = other DNA
aaaaagcagaaagtcttttt

SEQ ID NO: 137 - DNA, 20 bp, synthetic construct
  source 1..20: mol_type = other DNA
agctctgagttaatttaatt

SEQ ID NO: 138 - DNA, 18 bp, synthetic construct
  source 1..18: mol_type = other DNA
tacctccaacaaatgcat

SEQ ID NO: 139 - DNA, 16 bp, synthetic construct
  source 1..16: mol_type = other DNA
tacctccaacaaatgc

SEQ ID NO: 140 - DNA, 20 bp, synthetic construct
  source 1..20: mol_type = other DNA
gctcaaagaactaacatctg

SEQ ID NO: 141 - DNA, 18 bp, synthetic construct
  source 1..18: mol_type = other DNA
agtaaacacgtttacagc

SEQ ID NO: 142 - DNA, 20 bp, synthetic construct
  source 1..20: mol_type = other DNA
aatactctgtttgagtaaac

SEQ ID NO: 143 - DNA, 20 bp, synthetic construct
  source 1..20: mol_type = other DNA
taaaatcaatactctgtttg

SEQ ID NO: 144 - DNA, 20 bp, synthetic construct
  source 1..20: mol_type = other DNA
gtaaaatcaatactctgttt

SEQ ID NO: 145 - DNA, 19 bp, synthetic construct
  source 1..19: mol_type = other DNA
aagttatcatgtaattacc

SEQ ID NO: 146 - DNA, 19 bp, synthetic construct
  source 1..19: mol_type = other DNA
tctattatattaaattgca

SEQ ID NO: 147 - DNA, 20 bp, synthetic construct
  source 1..20: mol_type = other DNA
aacatgtataagttgtcaat

SEQ ID NO: 148 - DNA, 20 bp, synthetic construct
  source 1..20: mol_type = other DNA
aacatgtataagttgtcaat

SEQ ID NO: 149 - DNA, 19 bp, synthetic construct
  source 1..19: mol_type = other DNA
aactgactcaattgatatg

SEQ ID NO: 150 - DNA, 20 bp, synthetic construct
  source 1..20: mol_type = other DNA
actttgaattttttcacaag

SEQ ID NO: 151 - DNA, 20 bp, synthetic construct
  source 1..20: mol_type = other DNA
actttgaattttttcacaag

SEQ ID NO: 152 - DNA, 18 bp, synthetic construct
  source 1..18: mol_type = other DNA
agtaaacacgtttacagc

SEQ ID NO: 153 - DNA, 18 bp, synthetic construct
  source 1..18: mol_type = other DNA
agtaaacacgtttacagc

SEQ ID NO: 154 - DNA, 18 bp, synthetic construct
  source 1..18: mol_type = other DNA
ctatatttagcaacaatt

SEQ ID NO: 155 - DNA, 18 bp, synthetic construct
  source 1..18: mol_type = other DNA
ctatatttagcaacaatt

SEQ ID NO: 156 - DNA, 20 bp, synthetic construct
  source 1..20: mol_type = other DNA
tagaaaaaacctttaggatc

SEQ ID NO: 157 - DNA, 19 bp, synthetic construct
  source 1..19: mol_type = other DNA
tctattatattaaattgca

SEQ ID NO: 158 - DNA, 17 bp, synthetic construct
  source 1..17: mol_type = other DNA
tctttaatgtctttagt

SEQ ID NO: 159 - DNA, 17 bp, synthetic construct
  source 1..17: mol_type = other DNA
tctttaatgtctttagt

SEQ ID NO: 160 - DNA, 20 bp, synthetic construct
  source 1..20: mol_type = other DNA
tttgattacttctaaatctg

SEQ ID NO: 161 - DNA, 17 bp, synthetic construct
  source 1..17: mol_type = other DNA
ttttaatgtgacatgct

SEQ ID NO: 162 - DNA, 18 bp, synthetic construct
  source 1..18: mol_type = other DNA
aaacctagcaccttttag

SEQ ID NO: 163 - DNA, 18 bp, synthetic construct
  source 1..18: mol_type = other DNA
ttgctacactcaacagat

SEQ ID NO: 164 - RNA, 21 nt, Homo sapiens
  source 1..21: mol_type = transcribed RNA
caagttgtgaaattgtgtgtc

SEQ ID NO: 165 - RNA, 18 nt, Homo sapiens
  source 1..18: mol_type = transcribed RNA
aattgttgctaaatatag

SEQ ID NO: 166 - RNA, 22 nt, Homo sapiens
  source 1..22: mol_type = transcribed RNA
cagaactgtcaaagataaaact

SEQ ID NO: 167 - RNA, 31 nt, Homo sapiens
  source 1..31: mol_type = transcribed RNA
gacaaagatttccttgataagtaagtattaa

SEQ ID NO: 168 - RNA, 16 nt, Homo sapiens
  source 1..16: mol_type = transcribed RNA
aggtattctctgaaac

SEQ ID NO: 169 - RNA, 20 nt, Homo sapiens
  source 1..20: mol_type = transcribed RNA
cagatttagaagtaatcaaa

SEQ ID NO: 170 - RNA, 18 nt, Homo sapiens
  source 1..18: mol_type = transcribed RNA
gaactttccattgatatg

SEQ ID NO: 171 - RNA, 20 nt, Homo sapiens
  source 1..20: mol_type = transcribed RNA
ggatgtttaagatttcacat

SEQ ID NO: 172 - RNA, 20 nt, Homo sapiens
  source 1..20: mol_type = transcribed RNA
cagatgaagttgtaaattaa

SEQ ID NO: 173 - RNA, 22 nt, Homo sapiens
  source 1..22: mol_type = transcribed RNA
gtaaaagatttcaaagctttga

SEQ ID NO: 174 - RNA, 31 nt, Homo sapiens
  source 1..31: mol_type = transcribed RNA
ggtttgatgaacttgtgaaaaaattcaaagt

SEQ ID NO: 175 - RNA, 17 nt, Homo sapiens
  source 1..17: mol_type = transcribed RNA
agcatgtcacattaaaa

SEQ ID NO: 176 - RNA, 19 nt, Homo sapiens
  source 1..19: mol_type = transcribed RNA
aacaaatgcatgaatttca

SEQ ID NO: 177 - RNA, 17 nt, Homo sapiens
  source 1..17: mol_type = transcribed RNA
caggtagacttaaaaca

SEQ ID NO: 178 - RNA, 18 nt, Homo sapiens
  source 1..18: mol_type = transcribed RNA
aatgatcagccatatgtg

SEQ ID NO: 179 - RNA, 22 nt, Homo sapiens
  source 1..22: mol_type = transcribed RNA
gatattgaccagatgtttcaat

SEQ ID NO: 180 - RNA, 20 nt, Homo sapiens
  source 1..20: mol_type = transcribed RNA
catgtggatgctcattacta

SEQ ID NO: 181 - RNA, 16 nt, Homo sapiens
  source 1..16: mol_type = transcribed RNA
acaggaacttgtgctg

SEQ ID NO: 182 - RNA, 16 nt, Homo sapiens
  source 1..16: mol_type = transcribed RNA
ccttaagtaggaaaga

SEQ ID NO: 183 - RNA, 20 nt, Homo sapiens
  source 1..20: mol_type = transcribed RNA
aaaaagtggttggtgttata

SEQ ID NO: 184 - RNA, 20 nt, Homo sapiens
  source 1..20: mol_type = transcribed RNA
ctattgtagaacaattttct

SEQ ID NO: 185 - RNA, 20 nt, Homo sapiens
  source 1..20: mol_type = transcribed RNA
atgaaagtagaactgatttt

SEQ ID NO: 186 - RNA, 20 nt, Homo sapiens
  source 1..20: mol_type = transcribed RNA
cattgatgtgaatttgttga

SEQ ID NO: 187 - RNA, 20 nt, Homo sapiens
  source 1..20: mol_type = transcribed RNA
atttgaccaggttactattt

SEQ ID NO: 188 - RNA, 17 nt, Homo sapiens
  source 1..17: mol_type = transcribed RNA
atgccttatgttgatat

SEQ ID NO: 189 - RNA, 20 nt, Homo sapiens
  source 1..20: mol_type = transcribed RNA
attgacaacttatacatgtt

SEQ ID NO: 190 - RNA, 20 nt, Homo sapiens
  source 1..20: mol_type = transcribed RNA
aatgtagttaccatagcaat

SEQ ID NO: 191 - RNA, 19 nt, Homo sapiens
  source 1..19: mol_type = transcribed RNA
ggatcctttttaatatagt

SEQ ID NO: 192 - RNA, 18 nt, Homo sapiens
  source 1..18: mol_type = transcribed RNA
aatctccaaaaagttata

SEQ ID NO: 193 - RNA, 20 nt, Homo sapiens
  source 1..20: mol_type = transcribed RNA
ctgcttcattagatttgtga

SEQ ID NO: 194 - RNA, 43 nt, Homo sapiens
  source 1..43: mol_type = transcribed RNA
gatcctaaaggttttttctagctgataatgaagttcttttgga

SEQ ID NO: 195 - RNA, 19 nt, Homo sapiens
  source 1..19: mol_type = transcribed RNA
aattttgaaaagcctcttg

SEQ ID NO: 196 - RNA, 20 nt, Homo sapiens
  source 1..20: mol_type = transcribed RNA
agaatttaaaatgacaattc

SEQ ID NO: 197 - RNA, 22 nt, Homo sapiens
  source 1..22: mol_type = transcribed RNA
aatagactaaagacattaaaga

SEQ ID NO: 198 - RNA, 33 nt, Homo sapiens
  source 1..33: mol_type = transcribed RNA
ccaaataaatgtcaataataaaagagaattaaa

SEQ ID NO: 199 - RNA, 21 nt, Homo sapiens
  source 1..21: mol_type = transcribed RNA
catatcaattgagtcagttca

SEQ ID NO: 200 - RNA, 20 nt, Homo sapiens
  source 1..20: mol_type = transcribed RNA
aaaaagactttctgcttttt

SEQ ID NO: 201 - RNA, 20 nt, Homo sapiens
  source 1..20: mol_type = transcribed RNA
aattaaattaactcagagct

SEQ ID NO: 202 - RNA, 18 nt, Homo sapiens
  source 1..18: mol_type = transcribed RNA
atgcatttgttggaggta

SEQ ID NO: 203 - RNA, 20 nt, Homo sapiens
  source 1..20: mol_type = transcribed RNA
cagatgttagttctttgagc

SEQ ID NO: 204 - RNA, 39 nt, Homo sapiens
  source 1..39: mol_type = transcribed RNA
gctgtaaacgtgtttactcaaacagagtattgattttac

SEQ ID NO: 205 - RNA, 17448 nt, Homo sapiens
  source 1..17448: mol_type = transcribed RNA
ggtaattacatgataacttatgttactactcccatattatctctaaataactatgtaattagcttgtcactactatacagtgtgaagtttgatattactcatggataaagaacattggtaacttaagtgagtgagcaagggtggggtgagggatggaggcagcagggaaatcatagaattattacaatcaggaatgcaaatggttaattagatcattgcacccagtccttaaggatctgagccagagccatggagaataccaaacgagtctgaggtaaattctccatggcttgtcacagtgtcttctgaagaccataaacatacaacaaagtaagttgacaaagcacgcaacagatcaatgagtttgggatataatgcatgtaattttaaacagttccttttatttggggaggtttttcttttaagtaaatactaagaattttttttaattgaaaaatatttcactcatctcattttccaacatcctgaggttatatgtgtggcctatggggtgaggatgtgtagcactgggaactctcatttattgctggtaaaaaatgcaaaatggtaaacaaccactttggaagacaatttggcaatctcttacaaaactaaacatacttttaccatatgatctagcgatcaggctccttcgttgcccaaatgatttaaaaacttacgtcttcacaaaaacctgcatgcatatgtttatagcagttttattcataattgacaaaacttggaagtagctacatatctttcactaggtgaatggataaacattatcgatacaataaaatatgattcagccaacaaaaagtaatgagctatcagctgggcatggtggctcacacccgtaatcccagcattttgagaggcaaaggcgggcagatcacttgaggccaggagttcaagaccagcctggccaacatggtgaaaccctgtctctactaaaaatacaaaaattagctgggcatggtggcaggcgcctataatcccagctacttgggagactgaggcaggagaattgcttaaacccaggaggcgaaggttgcagtgagctgagatcgtgccattgctctccagcctgggcaacaagagcaaaactctgtctcaaaaataaaaaaaagaaagaaggaaagaaatgagctattaagccaagaaaagacatgagggaaccttaaatgcatgttgctaaatgaaagaaggcagtcttaaaggctacatactgtgtgattctaactacagtcatgcaccacataacattttggtcattgacagaccacatatatggcagtggtctcataagattataaaaccttatttttactgtaccttttctatgtttagatatgtatagatacataggtacttaacattttgttacaattacctaaaattcaatagaataacaggctatacaggattgtagcctgggaacaataggctataccatctaggtttctgtaagtacactctgatgttttcacaatgacacaatcacctagtgatccatttctcagaatatatccccgttgttaagcaactcaagactgtatatcacattctagaaaaggcaaaactatggagactgtaaaaaagtcagtagctaccatgggctggagctgtggcgcaaggagagagggatgaataggtagagagcactgaggatttttagagcagcaaaactgttttgtgtgatactttaatggtgtatattattatatttgtcaaatcccacagaatatacaacacaaagtgtaagccctaatgtaaactatagatattatttaatgataatatgtcaataatggctcatcgattgtaacaaatacacccactaactaatgtaacaggttaatcataggtggaactggggagtaaggggatgagggaagatttgggaactctctgtattttctgcttcattgttttgtaaacctaaaactgcccaaaaatataaagtctaatttttttaaacccaagtgggaaaacctttcttcgatccatcttattctactgacatcttgggtgtgtatgatggtctgtgtttcccagtgtcatcaatttcactgccttaaggtgctatggcttagacttgtgtcctgtggccagtgacctcacagtttttaccaaaatacttgttttcattgctatcacgtgatagctactctaagtatgattatccttcttaattctgttaggaatccccccggcattccctgtgagggaagtattagtccttgaatttccgtttcaaaagatgcgtactgatttacttggtatatagcttctgtaagaggaagtttcatttgggaaagaaaggttgtgctaaggttccctcagaaactttctaaattgccttctctaaaattgcctgtgtttccctaagcctaagagtaaaatacaggaaatagtgatgatttttatgtgcttgaggaatcttctaagaagagtgaccaattttattctacttatactgatacttgtactgatttaccttgtggaaaattcatccagtggctacaattactaactcactccaaaggcatgagtgggaaactattaaaataacacatcacttagctgaaactcttgaatggttgctcttaataaccatttttctgaataatttaaagttcccatgttttttaaaaaggtttattgacttagatctgatttgaaaagtgtaatgtagcttattatagaatatttaaaacataagaaaaacaaacaggaaaaaagtcatcccaactctagaaacttaacttttttcaaacacattttttttttttttttttttttttactattttgactaaacatgtttctaaatgtacttcttggatctgactaaagactaaaaatggaaggaaacacaagtagaaattataaagtcaggatcaggccagtgtggtagctcatgcctgtaatctgaaaaccttgggaggctgaggtgggaggatcacttgaggccagaagttggagaccagcctgggcaacctagtgaggccccatctctaccccaaaaaaaaaagaaaaagaaacttatttatttaatttcctctctttaaaggtatcatatgcaaaacagaaggtttgggggttttggggttttttgtttgtttgttttttgagacagggtctccctctgtagtccaggctagagtacagtggcacaatcatagctcactgcagcctcaaactcctgggctcaagcagtccccactaccttagcctcccgagtagctaggactaaaggtttacaccaccatgcccagctaatttttctattttttgtagatacagggtcttgctgtgttgccagggttggtctcaaactcctgggctcaagcaattctcctgcctcaacctcacaaagtgctgggattacaggcatgagctgctgtgcccagccagaagttttcattttagcacagtttaatctttcactttctggtttctgctttttgtgtgtcttatttaagaaatattttctacctctaggacataaagatattttttattttcttctaaaagtcttactatttttccatttacatttaactcattgatagacctggaattctttttttttttaatatagagtgaggtaatgttatttttccaaattgaaaactagttgcctaaacactacttttctaagaagccatcttttccccatgaatttgcaatggcaactctgttgtagctcaagtttccaccttttctctatttatttatagctatgccaacaaacactgcatttattattatagatttttagaagtatttaatctggtaagactagtctctcctatcatttttacttcagtaagtgtatatgcctgttcttgatcctttgctttttcatataaattttagaatcaacttatcaggttcccaaaaacattgttgagactgtgattgaatttgtattgaatgttatcttcttctccaataacccagcatatctctccatttaggtcctttgtaatatctttccataaagttctatagttttctttattagaggctggcataacttgcatcgcttttgtatttttaccaaattacatttttaaaactgttgctcttgtatatatatatgtgtgtgtgtgtgtgtgtgtgtgtatgtgtgtatgtgtgtatatatgtatatgtatatatgtatgtatattctatatacaaagctgctctcaatgaaaatattgacaaatttatttcttcttttacaattcctgtgtatgtgtggggtgtgtgtgtgtgtgtgtgtgtgtgtgtgtgtgtgtgtgaagatctcgcactgttgcccaggatagaatgagtacagtggcatgttcacagctcactacagcctcatccttctgggctcaagcaatcctcccacctcagcctcccaagtagctgggactacagtcatgtgccaccatgcccagataatttctgtattttttgtagagccgaggtttcaatttcttacccaggctggtcttgaactcttgggcttaagcgacctgcccaccttagcctcccaaagtgctggaattacaggcacaaactactgcacccagcctccctttacaattcttaaattttttttagtcttgttactcttgttagggcttccccactatgttaaatagtattgattttttattttattttattttttgatacagagtcttactctgttacccaggctggaatacagtggcacaatctcagctcaacacaacctccacctcccggattcaagcaattctcatcccttagccaaccgaatagctaggattgcaggcacacaccaccacacctggctaatttttgtatttttagtagagatggggtttcaccatgttggccaggctggtctcgaactcctgacctcaagtgatccaccagcctcggcctcccaaagtgctgggattacaggtgcaagccattacgcctggcctgattattattattttatttttattttttatttatttatttttgtttttgtttttgtttttttttgaaacgaactcgttctgtcacccaggctggagttcagtggcccgatctcggctcactgcaagctccacctcccgagttcatgccattctcctgcctcagcctcccgagtagctgggactacaggcacccgccaccacccccagctaatttttttttttgtatttttagtagagacaggttttcaccatgttagccaggatggtctcgatctcctgaccttgtgatctgcccgcctcggcctcccaaagcactgggattacaggcatgagtcaccatgcccagccctcattattatttttaatgggactgtgtatgttttctatttatttgtaattttactgtttccctttttccacattttctgcagttattgggtatgacttttataatcagaaaaacaatattttcacttgctttcttaaaaataaataatctcttagtgaaggcctgaggggtccttataggtgtaatatggatggccatggagctgctatggcttcaggctttatatatatgaggtattgctgtctattcacagtattctctgacctttaaatttatgtggcttaaaatctattttcaatgcataaacatttgtatatttttccaggtgaacaatgtactacctagatgtataataatttaaatttagtgtaaaatgagattttttacaacaaattatatatttccaaaaactttaaaatgtttaaactctacataggcatatggtggtctactatatataaaaggtttctgggaactatttaagaagataaaaatagagccactgacatgtatttgtactgtatctttgggaaaacaatttcagcgtaatatatacttgtaaaaagtgaattagtaaaactattctggccgggcacagtggctcacacctgtaatcccagcactttgggaggctgaagtagaaggattgcttgagcccaggggttcagaccagctgggccacatggtgagactccatttctacaaaaaatagaaaagttagtcaggcatagtggcacacacctgtagttctagctactcaggaggctgaagtgggaggattgcttgagcccaggagtacaaacaaaaacaaaaaaaactttattcctccaagtttaaaaagtgcagcttgcttacttgttgacaagctgctgaatatagaatgaacagtaatagagtctactgggttttaggttccagctaccatgaaaaactattaaggaactataaatagaaaagaaaaaatggactcataaagactttgttcatttccttctaaaatatccctagcttattaagtgtctccattaaggcttccgtacccactgacaatatttcttgattctctgtaaatgacactaagaaaattctagatgctatagctcttctatagtaactacatggaatagacagcttaagttaggaaattacattgccttttgagcacaccagcaatcctacctctgtgtgctttgaggaaactagtgtagcacctcctctttttgtacaactttaacatatgtttcaggtctcatgtcaaataccagatacaatttgtcaatttattgatcacattttgtaacatcagtaaaagtctaaataaaatcaaccagaagataataggctacaccaattgttaatgaacagaggtttatttggaaagattgttccaggattcagagccagctaacaatagctctaggaacccaatttattgtcgatgagagattctcaccttatgcctcgtcagctagaggacctaaagtctataacgtctcctaaagctgggaaaagcctgagaggcccaggttgatacgcctatgtgtaacaggatagagagaaggaaccaaagtaaaaaggcaacaacaactgcctcagcatatgagttcttgatttggaaaaacctgcactgatggttcttgttctctggtgtaatgcctcctatgcctgctctcttggctgtgttgaaaagcatacatacagagctgtgctcttcattttcaagatgatgtactgataaggaccacaagccagtggcactgggaaaaagggatcctaagagactttttcttattaaacatacattcaaagtcagttatttaatattttgctttttggactcttggtaagcccaaatcttgttctaaaaagagcagacttttttgttttgttttgttttgtttgagatagtgtctcactctctctcccattctggagtgcagtggagcgatatggctcactgcagccacaacctcccaggcttgggtgatcctcccacctcagcctcctgagtaagtagctgagactacatgtatgtaccaccacgcctggctaaatttttgaatttttttgtagggacggaattttgccatgttgcccaggctggtctcaaacttctgggctcaaatgatctgggtgcctcagcctccctaagtactgggattacaggcatgagccaccaggcctgacttgtttttgtttttttgttgttgttgttgcccaaactagagtacagtaggctcaatcacagctcactgcagcctcaacctcccacctcaagcagtccttccacctcagcctcccaagtagctgggattgcaggtgcatgccaccacgcccagctaattttttttttttttttatgtagagacgagtctccctgtgttgcccaggctggtttcctgggctcaaatgattctcccatctcagcctcccaaagtgctcagattagaggtgaggcatgagccacccaacctagccttttttttttttttttttttaatacctgcaagccacatttatctgctatagtgtttaccaaccacactctggggcctgaggctgtgtttcagtgaatgaaatattaaaaagtactttgtttacttgctgacacagtacagtatttgtatctattaatagcatattgttattgttggttttttttttcgaaaaacactttattggaataatatacttaaaatgcagggaacttttaaaaatagagtgaggccaggcatggtggctcacacctataatcccagcactttgggaggccgaggcaggcggatcacctgcagtcaggagttcaagaccagcctggccaacatggtgaaacccgtctctactgaaaatacaaaaactagctgggtatagtggtgcatacctgtaatctcagctactcaggaggctgaagcaggagaatcacttgaacgctggaggcggaggttgcagtgagccaagatcacaccagtactccagcctggatgacagaggagactctcaaaaacgataataataattataaaatagagggtgaaagaccaaacatcctatagaaaaataagcaaaagataaaaattaattcacagagagatttgttctttaaagatatataaaaagatgttcagcttcacttaataagagaaatccagattaaaattatactgaaatatttctaacccatcggactggcaaaaattcaaaagctggacagtgtactatattggtgaagttgtggggaaatgggcactcttacattactagtagaaatagaaaatccttaaacctctatgaaggagaatcactaataaaactatgtatgcatatagttactcattaacctagcagttctacttctagaatttatcctgaagatacgcccctaataacacaaaaatacatatgtaaaattttattcattgtagcattgtttatatttccaaaacattggaaactatgtaaatgcccacacataggagatagattaaactacagtgtatttatacatggagatactatgtagctgtaaaaaagaatgaagaaaatctctaccaattgatgtataatgattaccaggagattttggtctctgactacaggagtctcgctctgtcacccaggttggagtgcagtggcgtgatctcggctcactgcaacctctgcctcctgggttcaagcgattcttctgcctcagcctcccaagtggctgggattacaggcacccgccaccacacccggctaatttttgtatttttagtagagacaggatttcaccacgttggccaggcaggtctcaaactcccgacctcaggtgatccacccgcctcagcctcccaaagtgctgggattacaggcgtgagccatggcacccagcctccaagagatacttttaagtggaaaaaaagcaaagtgtaagagagcatatatagtgtattacctccttttgtgttaaaacaaaaaaaaaaagaaaagaaaaagaaagaaaaggaagaaaatgtacatacatctgcttacctttactaaaagaatacaggaagataaaccagaaaacagtgaaagtggttgcttaaagggatggtgaggaggacatggtaaagagagtcactcttctttgagcatatcttttatagaatttttacttttagaaacatgttaatgttctacatattttttaaatattaaatcaataaggatagaatgtaagaaatgggactaaaactgaaagcaaactgaaaaacatgaacccaactatttccaatcttttcttaagtaaaatgagctccccaaagggggtaaaaaagagaaccaatctaagttacatgctgaacacagtatttgactacaccagagaacagaaaattaaccctaaactctttttagtagatttggatttttttcttttaaagttagggatgaagtgacttggaaactattttagatgtattacaaaagtgagtaaacaaataaatttgttgatatttttgggagctaggttctcactataaaagaaggaacatacaaataatgggatgaggaaaggcaagaaagaaccctgtggagatggactagaattggaagtactggtgtcagctcaatttctaaaataggtctctgtacacatgtatacgtatacagttatggatgtaagtgtgtgtgtgtgcatgactatgtatacatgcatacttcccagctctgttcattaacatggtctagaagcaaagagcacagctgccacccagatcttggtctctaataccattctgtgctaaaaagaaccagttatcctcagataaatggctgattccagggcatagtagagcccagaacattatgccagaacataaagaagggatcaaaaataatgtgatggcatatccaatgacacgggagccaccagcctgaacggctcccactggcaaaaactggaatattttaaggaccaaattaattaagggctgtaagggattataaaccattgatttaaaaagaattgtgggccaagcatggtgtctcacacctgtaatcccagcactttgggaggctgaggtgggcggatcaccttaggttgggagtctgagaccagcccgtccaacatggtgaaaccctatctctactcaaaatacaaaaattagccaggcatggtggctcatgtagtcccagctgctacttgggagactgaggcaggagagtcacttgaactggggaggtggaggttgcagtgagctgagatcgtaccactgcactccagcctcggtgacagagcaagactccaccacacaaataaaataaaaataattgtgcattcttattgataataaatagattttaaaataataaatgggagaagaggtaggctcttgtttatggtagaatggtgagggctgactggtaaatgtgaaaatcatttcacagctgcagttggaaaatcatcacagtatgagttgcttcagttaaaaattatgagtggatactcaatctgggagggggttgggacttttgataaagaacagaatatttatgtgatttttttttttttttgagatggagtctctgtcgcctcggctggagtgcagtggcgtgatctcagctcactgcaacctctgcatcccggattcaagcgattctcctgcctcagtttcccaagtagctgggactacaggcacccgccaccatgcccagctaatttttgtatttttagtagagacagggtttcatcatattgaccaggctggtcttgaactcctgaccttgtgatccgcccccctcggcctcccaaagtgctgagattacaggcaggagccaccatggccagcctaatttgatttgaggatttgctcagtctgtcttccttccttctttccttccttccttccttccttccttccttccttccttccttccttcctctctctctctctggtctctttctttcttttttctttttttttgagatggagttttactcttgttgcccaggctggagtgcagtgacatgatctcggctcactgtgacctctgcctcctgagttcaagcagttctcctgcctcagcctcccaagtagctgggattacaagcaagtgccataacacctggcaaatttttgtatttttagtagagacgaggtttcaccatgttggccaggctggtctcaaactcctgacctcatgatctgcctgcctcggactcccaaagtgttgggattacacgtgtgagccaccgtgcctggcctatgtgatcttaaattgtctattcacaaactgcttgttagatgcaagggaaaaaataggtactatacaatggagaagtaggacaacaccttgatcaggtggtcagaattcctatcaccagtgcacagcagatggacatgatgtgcctctaaatgtgacactttgagaaggatccatcataatgtgtgtagtagtctgcctgggtgtgcatagtctgaacttaatcatgagaaaatattagacaaatccaaaattagaatcagtctattaaaaatgggaaaataaataagtaatgggataagcgcgtcagacacagtggctcacacctgtaatcccagcactttaggaggctgaggcgggtggattgcttgagtccaggagttcgagaccagcctgggcaacatgacaaaaccccatctactaaaagtacaaaaaaattagccaggcgttgtggtgtgcacctgtggtcccagctacccgggaggcagaggtaggagaatcacctgagcctagggagttgaggctgcagtgagccaaaaaaaattatgccactgcactccagcctgggcaatcagagtaagaccctgtctcaaataaataacaaataaattaaaaatgaggtgaggtaagttatgactatattcttcaaaaatgtccgtatctcaaaagtcaaaatctgaggaaatgttccagatttttaaaaactataaagataccacagttaaatcctgaactagactctgttccagaggagaaaatttccataaaggatattattgggtaattgactaaattgaaatatggacagtagattagataacagtgttactgaagttgatgttgatgtccacactgtagctatgtaagagaatatccttattctcagaaaagatacactgaagttttcagaagtaaaaagacattgtaaatgtaacttcctctcaaatagttcagggaaataaaattgtatgcagagaaagagtacatgcaaatggtgcaaaatgttaacaatattgtgcacctgggtagatgatatgcagatgctttttgtactatttttattcctgcaacttttttctgaatttggaatccttttcaaataaaatacattttaagcaggctaataattaaaaatctaaactaagattatattgggaaacattatgctaagtgaaataagctagacacaaaaagacaaatattgtatgatctcacttatatgaggtacctagaataggcaaatttatagagacaaaagtagagtagcagttaccaggggctagaagtaaagaggagtggggagttattgtttaatgggtacagagtttcttttggggtgatgaaaaacttctaaaaatgcatagaggtagtagttgcacattgtgaatgtacttaatgtcactgaattgtgcatttaaaatttgttaaaatagtaaattttatgttacgtatatttttcaaaataaaaaagtatcttggggatgtttacttccattataaaaggattccctacaattatttaaatataagctccctttgtttatttaaacaattttatacagctttcaagattcacatcagatactttttgaagattccacttataactgattatgtagtatctgtatttcattttagttggtttttaaaaatagattattgaaaaactgacattcaccttgggcaaaggtcttagcttttttcagcatccaggttctccacttgtcaaagcaaaagattcttcagaatacttcattcatcatctagttctcttagaaaaaggatgctggtggttttgcttcacaaaaatatttcataaacatgagctttttctttttctcacaatgatcataccaggcggaatgaagaaaacagatgttgcttataaggcgtctaatagacatgtttgcattgtaagctgatctgactctgaatttggcatctgctccattcactgtgtggactgagcattttcgcctcacagtttggcagaaaagttaatattgacttttgactgttacctgaaaacttggtgataaaatactcttactaaacctcttgagagagtgattttacagtctcagcaaatgtctttaaaatacatcattctattaaccattttaattttattctttggttgggaatacttatttgtttcatctaatacagagcattccccaaatctgactgggaaaagtctgtgtggtcagaatggtagaagaaggaggacataaatcacttataatgttctctacaggtcattataccacagcttctcaattaaccttcatccccctcaggctgcccagggcctcagggaaggcccagaagcctagctgcagcacagtttctcattattatctgctcttctgagtatttgagtgttaactgcagcagctcagcagctcaggtttcccctaaggggaaggtagcccagattcttctgctcttgacctgtcttatttgcaattatcctttttttcttttttcacagttttattgtggcataatagacatacaataaacggtatgaatctaaagtttacaattgtataactttggacatatgtgtacacccatgaaaccatcactatggacatatccactgctcccatggccttttctaatcatgccttcctgctccttctcatccccttttggattgtttccagtttggggctattacaaataaagctgctgtgaacattcatttacaagtctttgtgtggatatgtgctttcacctaccttgggtaaatacctagaaatagaacggatcatatgatatgcacatgtttagctttttaagactgacagatggtttgggaaagtggtcttagcattttacattcccacaattagtgtgtgagagttccagttgatcacacccttgccaacacttgttatagtcagtcttttcagttttagccattctgcgagtgtgcagtggtatctaattgtgattttaatttgcatttctttaatgaataatgatattgaacattttttcatttgcttatttggcatctatcttctttgctaaaatgttaaatacttttgcctactttgtgttgagttgtttcttgttattgaggtaccaagtatttaattgtgacaaagttcagattattttttcttctataaaagttgcattcttagccaagtgtggtaacttatacatgtaatcccagtgctttgggaggccaaggcgggcagattacttgagcccaagagttcaagaccaacctgagcatctctacaaaaaaatgcaagaattagaggaaagctgaggtgggagaagagcttcagcccagaaggtcgaggctgcagtgagccatgagtgtgccactgcactccagcctgggtgatagtgagacactgtctcaaaaataaataaatttttaaaaaagaaaagttcatactttttacctcttactaagtgatctttagcaaacccaagatcactaagattttcttctatgttttctcctcaagagttttaggattttattccttacatttatgtctgtgattcatttcaagtgaatttttgtagatagtgtaaggtaaaggttgaaatgcttttttttcacacaatttgttaaagtgtcctttcttgatgggattgtttgggcacctgtgtcaaaaatcagttggctatacagaagtaggtttatttctggactctgttcagttccattgatctatttgtctatatgctaataccatagtgtcttggttattatcattctataataaattttgaaatcaggtagtataaatcctctggctttgttcttctttttcaaagttgagtttttgctaacctaggtcctttgaatttccatataaattttagaagcagcttgtcagtttctataagaaaaatctgctagaatttttattagtattccaatgaattaatagaaaaattcctgcagaactgataatattgaatcttctgacctttgaacactttatgtctatttatttaggcttcttttatatttctcagcattgttttgtcattttcaatgtgcaggccctacacaacttctgtcagatttattctaaggtacttcaaatatttgaagtatgtgaagtaccttagaataaatatggataaatattcttaactttttaatcaatttttgtttttgagacagggtcctactctgttacccaggttggggtgcagtgatatgatcatagctaaccacagccgcaaccttccaggcttaagcaatcctctcacctcagcctcctgagtagctaggtctacaggcatgcaccaacatgcatggctaatttttgtattttttgtagagacaggatttcgccatgttgctcatgctggtctcaaactcctgagctcaagcaattcacccatcttggcctctcagagtgctgggattataggcatgagccacgatgcctggcttattcttagtaacttctaattgttcattgctcgtatgtataattatatatacacattaccagtatagataatttacttttgtatttttagtagagacggtgtttcaccatgttgattttgagaccctatcaacatatgcttccctggctgggtgtggtggctcacgcctgtaatcccagcactttgggaggccaaggcaggcggatcacctgaggtcaggagtttgagaacagcctggccaacatggtgaaaccccatctctactaaaaatacaaaaattagctgggcgtgatggaaggcacctgtaatcccagctactcgggagcctgaggcagaagaatggcttgaacctgggaggcagagattgcagtgggccaggatcatgccattgcactccagcctgggcaacaagagtggaactccacctcaaaaaaaaaaaaaaaaaggaagaccagattgacttgatggcaagttgttgtgtctcaacttgagctctttagaataaatattaggggaagctcatgatgtttgggaaaagatctcccgaccgggcacagtggctcaacacctgtaatcccaggccaaggcaggcagatcacgaggtcaggagtttaagaccagcctggccagcatggtgaaaccccatctctactgaaactacaagaattagctaggcatggtggtgcatgcctgtagtcccagctattcaggaggctgaggcaggagaattgcttgaacctgggaggcggaggttgcagtggccaagatgatgccactgtactccagcctgcgtgacagggcaagactccatctcggggaaaaaaaaaaaaaaaaagacctccctaacggtaacgcacaagactttctcttactgtcaaggctgaagaatgagacaggtgcttagatcatatattggtctgacccaatatgacatttctgctgctgttatacaatactcatgtgtttttttttgcctgtgttctaggttttctgtctcaactggtctctgacaagcctctgactgaatgtatccgtgctggccactatgcagcaagcatcataattagacggactggctgcacctttcctgagaagccagacttccactgatggaagagctgaaaacacaagcccaggagtgcagacactgccctaattgcttcctgagaattcccatattaataaagaagaaaattatctgccattttttcctactataataatgctgaatcttaatttagagggtacaagggtatggtaatgcttgtagaatctttattatctcaacaatctaaaaaatgatgtttatttccatagtttgatagtgccacttaaatgccaattaaacaagaatataacatttcaatagaaatttttatttcattttcaattactttgtaaattcgtgtgtatttagtacactgatttgtttttttacatttctgctttgaatgcagatgcaatttaatataataga

SEQ ID NO: 206 - DNA, 22 bp, synthetic construct
  source 1..22: mol_type = other DNA
ccaacatccagtttttctccag

SEQ ID NO: 207 - DNA, 19 bp, synthetic construct
  source 1..19: mol_type = other DNA
agcagaatgagcagccaac

SEQ ID NO: 208 - DNA, 21 bp, synthetic construct
  source 1..21: mol_type = other DNA
gcgatgtcaataggactccag

SEQ ID NO: 209 - DNA, 22 bp, synthetic construct
  source 1..22: mol_type = other DNA
ttgttgtaggatatgcccttga
